United States Patent Application Publication US 2026/0218149 A1 - sequence listing, part 2

SEQ ID NO: 1712 - protein, 1234 aa, unidentified
  REGION 1..1234: note = Category: MG77 effectors
  REGION 1..1234: note = Description: MG77-2 effector
  source 1..1234: note = uncultivated organism sequence
MSNFYSTFINLRPVSKTLRFSLIPIGKTRENIRSAEIISQDEKKSQDYVILKDVFDTYHKAYIDQHLCRIQGDWSELAKALEERQSSQSAETLNRVQTAYRKEIAKLLISEKATKLGKNDHLFLADDGVTFLQKNDLAKLIKLTVDEKRAAERENRRPEYLIPELGEHIKAVEQFDRFAGYFLAYQQARNNIYTDEGSTSVAHRVVNENFPKFMANIHTYRRLPESLKQEFEHSLEDLLYGVPLETVFSTDYFNAVLAQTGIERYNTLLGGKTEEGGVKIQGLNELCNLAFQQGILPKKVVFVPLYKQILSDRDRASFLPEKFKSAVEMLTALGHFMTELNEMIAAEHESVADNIKSGICDSDRVYIGKSQLASLSMLCFDNWNKLRDAVRPKEVYSLSELQLVSEKDILGIVREQFLAKLGKITEASTSLPPVLKKETLREEDYSKIKTYLDAVIDAQHLLKIFDADDDADKDSVFYGTSDALNETLRKGIPLYDKVRNFATGKPYSEEKFMLTFDAPTLLNGWDKNKERDNCCMLFRRDGLYYLGILNAKDKPTLTEEAEIDGPSYEKMVYKYLPTPSKMLPKVFNKSGRWIAAHGLDDEIRDGYEKGLHKVGPDFDPVFMHKLVDYYKVCISQYEDWATFRFRFSDTETYRTMADFYGEISAQSYNVSFTKVSERQINDAVDAGQMYLFQIYNKDFSEFSHGAPNLHTIYWRELFSAENLKNPLVKLNGEAEIFYRHPSVKNPFRHQKGDVLINKVDAEGVTVPDARYRTAASDAASSMPLEILRASYPELIFKIADREIVKDNRYTKESFAFHVPLTLNYGCDAGIRLNQTVCEKLQSDEPYYIMGIDRGERNLIYISVIDRHGRIVEQRSLNVVGQNKVDYQAKLDTLERERQDARKNWRAITAIKELKEGYLSFAIHEITELMMRYPCILVMEDLNFGFKRGRFHVEKQVYQKFEKMLIDKLGFCMLKDRTPEEEGSVRHAYQLTEPFESFQKLGKQSGVIFYVPAAYTSKIDPLTGFVNLFTSAQLNYTSVEAARTFFGTMREIGYDAQRDCYRFAFRYGDYDLNKKDYTDAWTVYTAGEDRIAHSVKNGRHEYETVDVTKRMKALFARFGIDPYASDLRAAIAAVDKKEFFSELLRLFRTTVQLRYEDQTQDFILSPVEKDGRFFDSRTAERDLPQDGDANGAYHIALQGLRLVWERIENGKVKTDGKGEQSYNWFRFVQKKEYRK

SEQ ID NO: 1713 - protein, 1236 aa, unidentified
  REGION 1..1236: note = Category: MG78 active effectors
  REGION 1..1236: note = Description: MG78-1 active effector
  source 1..1236: note = uncultivated organism sequence
MQQFIGVYPDSKTLRFKLIPIGRTLEMMEKNAIIQNDTKKYEGYKRLKKIIDEYHKAFMDHSLKDLYLEGLEEYSELYNRSKRDVSQEKKYKELQANLRKQVINAIKKDPQFKRLFKKELITEDLYKFVGDNEEIIDLLQEFSEYTTYFTGFHQNRENMYTDEEKSTSIAYRLVNQNLPKYLDNIKIYELLMTSSVAEQVEGLEKELRSLYGVLSIKDYFTIDGFNLVLTQKGIDVYNTILGAYAKENGEKVQGLNEIINIYNQHVKEKAKRIPIMKELYKQILSDRDTVSFVNEKFESDEDVFEAIDLFSTELEQTIIMPQNDMAVKALLLNIADYDLKHIYINNDSFITTISKYLYGDWSCIHSAISDHYDALKGGKVKDRKYEEKKQKELKQVADYSISDLDNYVSKYKNESKKMEDYFTEQCASILAEIEKTKEKYLELSAHCKDKEDSAIRKDDKNIGIIKEYLDAIKKLQRLLKSLVLGQQEPDKDELFYGELIRIWDALNGITHLYNQVRNYVTQKPYSLEKIKINFEKSTLLAGWDKNKERDNLGVLLLKDGNYYLAIMDRKHNKSFLEVKAATSDVYQKMNYKLLPDPSKMLPKVFFSQKRIQEFAPGEEILQIRESGSFKKGDNFNLEDCHKLIDFYKASINKHEEWKNFGFSFSDTKDYADISGFYKEVSDQGYKITFEDVDADYIDRLVEEGKLYLFKIYCKDFSPYSTGKPNLHTMYWRALFDEENLKDIVYKLNGQAEVFYRKASIPLKITHPANEPIHNKDLNAKKQTSVFPYDLIKNRRYTCDQFQLHVPITMNFKASGENRFNKRVNQYIHDTKGMHVIGIDRGERNLLYICVIDENGKIVYQKSLNEIISCRTNEEANEGHCVDYHLLLDAREKQNKEARENWTTVNSIKELKEGYLSQVIHIITDLMIRYNAIVVLEDLNFGFMRGRQKFEKQVYQKFEKMLIDKLNYLVDKDKEWTEDGGVYRAYQLTDKFKSFQMLGKQSGFLFYIPAWMTSKIDPSTGFVNLFYTKYENMEAAKNFIHKFKRISYNEEKAYFEFEFDYKDFTYKADGTKTDWTVCSSGMRIKHFRDHEKNNNWSTKTIYLTDDFKELFDEYEVKLQADNMQDQLLGLSDVHFYKKFMELFSLMVQMRNSNEEGEDNITSPVLNQNGEFFCTHKNERGSDRIIPEDADANGAYNIAKKGVLIIEKIRKTDVNDLDKVKLAISNKEWLQYAQEHIL

SEQ ID NO: 1714 - protein, 1235 aa, unidentified
  REGION 1..1235: note = Category: MG78 effectors
  REGION 1..1235: note = Description: MG78-2 effector
  source 1..1235: note = uncultivated organism sequence
MNRILADDFIGMYPVSKTLCFELRPIGKTLEHIERDGIIDTDVIRSENYAKVKKIIDEYHKAFIQKVLAKVQLDGLEDYYRFYNTIRRTDREEKAFLNCQENMRKQLSKAFKDDDAFKTIDKKELIKNDLVSFFAEDREKLDLIREFSDFTTYFTGFHQNRQNMYSDEAKSTSIAYRIVHENLPKYFDNIKVYDQIMATSISEQVAELESNLCVVFENFGKIGDYFIIPGYNAVISQEGIDRYNTIIGGYSEEDGKKIQGLNEIVNLYNQKHKVHLPKFKLLFKQILSDRERISFIPDEFASDIEVFDAVQGLLQRLDEELFENGEDNITISELFSDLSIYDLNGIYVTNDSSITTISQELFDDWSVIRNAIDRKYEEMNPIRRMKQEKYDEKKTTELKKIKSYSIGNLNALMEENLKSEGIEKYFTEKITHALLEIRTASENYRKIDVDKYQVGRALKGNDRDISLIKGLLDSLKELQWIIKPLNAGFEEAEKDELFYGEYTRIWDTLEAITPLYNKVRNYVTGKPYSTEKVKLNFGRATLLNGWDKNKERDNLGIILLKDNNYYLGIMNRDNTQCIDEAPQAGSEKVYEKMNYKLLPGPNKMLPKVFFSKSRIDEFSPTPELMHNYKKGTHKKGDLFNLDDCHKLIDFFKASIEKHEDWSQFGFQFSETGSYAELNDFYKEVSQQGYKITFSNIDESYIDKLVDEGSLYLFQIYNKDFSPYSKGTPNLHTLYWKAVFSKENLDNVVYKLNGEAEVFFRKASIRQEDIIVHPAGKEVANKDPFNEKKTSLFSYDIVKDRRFTCDKFSFHVPITMNFKADKQRNINERVNLALRAAKDIHIIGIDRGERNLLYVSVIDMNGKIVEQMSLNELLSYDKNKNLHRRDYHQILTERERENKSARQNWTTINTIKELKEGYLSQVVHVITDLMIKYNAIVVLEDLNFGFKRSRQKFERQVYQKFEKMLIDKLNYYVDKQKNYDENGGLLKAYQLTAKFTSFQTLGKQSGFLYYVPAWNTSKIDPTTGFTNLFSLRYESVEKTKAFIRNMDRIWYDADTGAYALSFNYDRFTYKAEGTKTDWIIYTFGKRIEHFRNKEKNSEWDVKYIDLTESFSELLAEYGISRELEDIKGEMLNISDAEFYKRFMKILSLTLQMRNSDEVNGVDEIISPVKNRRGEFFISGTCKDLPVDADANGAYNIAKKGLWLVEKIKETPEEDIANVKLALSNKEWLKFAQDNTL

SEQ ID NO: 1715 - protein, 1235 aa, unidentified
  REGION 1..1235: note = Category: MG78 effectors
  REGION 1..1235: note = Description: MG78-3 effector
  source 1..1235: note = uncultivated organism sequence
MKKRIADEFINLYPVSKTLRFELKPIGRTLEYVERDGIIETDVARSQNYTEVKALIDEYHKAFIQKVLENTELSGLEGYMNLYSNAHRADREEKEFEACQSDLRKQISKSFKQDPAFATIDKKELIKNDLISFYEGDQEKQALIESFSEFTTYFKGFHENRQNMYVDEAKSTSIAYRVVNQNLPKYCDNIKVFQLISETTISVSVAELEEKLNAKYSDFGKIGDYFTIDGFNKVISQKGIDRYNVILGGYTTKDGEKIQGLNEFVNLYNQKYKEHLPKFKLLFKQILSDRDSASFIPDQFESDQQVFEDIEKIYQRIKEELLENEEEITISELFSDLSAYDLGGIYVKNDGSLTAISQELYGDWSVIKSAINSDYENNTPIKRTKREKYEETKKKELEKVKSYSILSLNSFMSNIHKEANVEKYFTNKVTDALDRVAKEYRIFNGIKTGKYENGKSLKSNDSDIAKIKGLLDSLKELQFSVKPLIAGTDEAGKDEVFYGEFLRIWECLDIITPLYSKVRNYVTSKPYSTEKVKLNFGKSTLLDGWDKNKEQDNLGVVFLKDGNYYLGIMNRRDTGCIDSAPIANSDHVYKKMNYKLLPGPNKMFPKVFFSKSRIDEFAPSEELLSNYRKGTYKKGDNFSLEDCHDLIDFFKQSILKHEDWSQFNFKFSDTKDYENISEFYKEVADQGYKINFNDIDESYINKLIDEGSLYLFQIYNKDFSKYSKGMPNLHTLYWKALFMPVNLKNVVFKLNGEAEVFFRKASIRQQDIISHAAGQKIKNKDPLNEKTESLFEYDIVKDRRFTCDKFMFHVPITINFKAAGERYMNLRVNNMIHNADEMHIIGIDRGERNLLYTCVIDLNGNIVEQMSLNEILSYDKNNNLHRRDYQRMLTEREKENISARQNWTTINTIKELKEGYLSQVIHVITNLMIKYNAIIVLEDLNFGFKRGRQKFERQVYQKFEKMLIDKLNLYVDKQKAVDENGGLLNAYQLTAKFESFQKLGKQSGFLYYVPAWNTSKIDPTTGFTNLFYTRYESVEKTKMFIQNMDRIWYDESTAAYAFSFDYNRFTYKAEGTKTEWTIYTNGRRIERFRNPEKNSEWDVKSVDLTAAFDELMTEYSISKDTEDLRNTILEIQEADFFKRFMKLISLTVQMRNSDEKNGVDEIISPVKNARGEFFVSSGTEKYLPVDADANGAYNIAKKGLWIIQKIKETPEDEMAKLKLTMSNKEWLKFAQENTL

SEQ ID NO: 1716 - protein, 1245 aa, unidentified
  REGION 1..1245: note = Category: MG78 effectors
  REGION 1..1245: note = Description: MG78-4 effector
  source 1..1245: note = uncultivated organism sequence
MNQEKGNLLSEFTNLYPVSKTLRFELKPVGRTQEHIEYDGILDADFQRAEDYKKVKKIIDRYHKEFIEISLRNVFLTKEDLNTYKELYETNAAARDEKWEKHFNKAKESLRKQIERCFKDAPAYKNLFKKELVQKDLIEFVKGSEEETKLVQGFKDFTTYFQGFYENRKNMYSAEDKSTAIAYRLIHQNLPKFIDNMHIFQKVEQSPIKDQLNTMFYELKAKIDIASISDYFALEGFSKVLTQSGIDVYNTILGGYAEGNVKVQGLNERINLYNQQLSKEEKKQLSIPKLKPLFKQILSDRESISFIPEQFADDQELLDAISEFYRNIQQTIFENEELITISQLFGQSDSYNWNRIYVKNDAFITTMSKQYLGDWSIVTRALEMDYDLAHASKKKGAKYEEKRGKELKRVKYYAVQKLNQIVMQYYGQECQIQQWMNQQIQETLQMIYENYDAASALLNTTYVTKKSLCNNQQAIGQIKLLLDSLKQLQNLIKPIANTQNETDKDELFYSELIRIWNELDPLTLLYNRVRNYVTKKPYSLEKVKLNFNKSTLLNGWDKNKERDNLGIILRKDGLYYLGIINPKCTNVIEKAPEATESTCYEKMEYKLLPGANKMLPKVFFAEKNIEEFNPSEEILAIREDESFKKGNNFSLENCHKLIDFYKQSISKHKDWSKFGFEFTSTSEYQDISGFYREVENQGYKISFRDIDVSYIDELVEQGQLYLFQIYNKDFSPYSKGTPNLHTLYWKALFSPENLSNVVYKLNGEAEVFYRKASIAETDKVVHKANEPVKNKDVHTEKETSVFEYDLVKDKRYTVDKYQFHVPITMNFQAQGENYMNRKVNQMIHDNKGIHVIGIDRGERNLLYLTLVDPEGRIIKQMSLNEIISYDKQNRKHVKNYHDLLDVREKENKSDRQNWKTVNTIKELKEGYLSQVIHVITKLMVEYNAIVVLEDLNSGFMRGRQKFEKQVYQKFEKMLIDKLNYCVDKTINPEQSGGLLHAYQLTKRFDSFKKLGKQSGFLFYIPAWNTSKMDPTTGFVNLFYVKYESVDKTKEFIKKFDSISYNSERSYFEFAFDYSKFTYKADGTRLHWTICTHGERIENFRNPEKNNEWDSRKITLTTAWKKLLEKFEIDYTQKNLIDQMLQCNDTEFFKTFMRYFRLILQMRNSDAKTGEDWICSPVMNEHGKFYFSGEESTLPLDADANGAYNIARKGLWVIEQIQSAQLDKLDKIKLAISNKEWLKYAQEHTL

SEQ ID NO: 1717 - protein, 1208 aa, unidentified
  REGION 1..1208: note = Category: MG78 effectors
  REGION 1..1208: note = Description: MG78-5 effector
  source 1..1208: note = uncultivated organism sequence
MKDEHRAESYKKVKKIIDRYHQQFIDNVLDNIALEGLNEYQEYYCIKNRNEQQEKQFENIKKKIRKQISDAFTGNPKFKCIFSKDMIENELLEYTKDNTDEQELIYEFDKFTTYFQGFYDNRKNMYSCDGKSTEVAYRIVDQNLPKYIDNISIYKTALSAGLDKQISDAINKIKTYYNIPLSEQLFDVNGFNNVLSQKGISIYNYIIGGFSDKERSKIQGINEIINIYNQHVDKKDGKKIPKCKQLFKQILSDREDAPFIIEQFESDEEVFSAIDNFYCEMNVSIFNNVDSINVQQLLSGINNYNLSGIFIKNGLAITDISKNLFSDWSIINHALEMNYDKNNNTKNKQTEAYIEKRKKVIKKQKAYSIEFLNNVVTEYTDKEVHIEKYYVDKFNNEDNLVNKIIEQKRHYDELLATSRKKPLRKNDVLIENIKQLLDLFNELQRLIQPLINYDESAKDPLFYSEIERIWNILDLLTPLYNKVRNYITKKPYSIEKSKINFNSPTLLKGWDKNKEETNLAIIFEKNGLFYLGVIDKNNNKVITKAPKAKSNNVYKKMIYKQIPNPSRDFPHVFLAKGNIDYYKPDNELLKKYEQKTHLKNNPNFCLEDCHKLIDFFKQSIKKNEDWAKFNFVFSDTKTYKDLSDFYREVDAQRYKITFENIDEDYINQLVSEGKLYLFQIYNKDFSEYSKGKPNLHTLYWKMLFAPENLENVVYKLNGEAEIFYRRASIKQDEIIKHPANEPINNKNELNKKAKSVFEYDLIKDKRYTIDKYQFHVPITMNFGAQGDNHFNLSVNKAIKYADDVNVIGIDRGERNLLYLVVINSKGEIIKQKSLNEIITVNNNKTEFHTDYHILLDKREKENVSARQNWKTINTIKELKEGYLSQVIHVITEWMLEYNAIVVLEDLNFGFKRGRQKFEKQVYQKFEKMLIDKLNYIVDKNKDIYESAGLLNALQLTNKFETFKTLGKQSGFLYYVPAWLTSKIDSTTGFANLFNNNDIRYSSVEASKEFFSKFISITYNPLGIHGSDYFEFSFDYNDFTYRAADTQTHWTVCSYGERIHHFRNQEKNNEWDTQYVDLTKSMKNLFDNYNINYQNVDIKEDILKISEKAFFKELLWLFSLILQMRNSDSDNNVDRLISPVLNDKNEFFDTGLKIEEYPIDADANGAYNIARKGLWVINQIKLCDDDKLNKLKLAMSNKEWLQFAQENRL

SEQ ID NO: 1718 - protein, 1299 aa, unidentified
  REGION 1..1299: note = Category: MG79 effectors
  REGION 1..1299: note = Description: MG79-1 effector
  source 1..1299: note = uncultivated organism sequence
MNNLSQFTNLYLVSKTLRFELKPIGKTLENIEKDGIISEDEKRAENYKKVKIIIDKYHKWFIEKSLSCVKLPEEKLNIYYNLYKATPDVKKEEKWNKEFEDIKKELRKEITNSFSSDEVKDLYKDLGKKELIRDILPEWKELDEEEKQLFGDFYQFTTYFVGFNENRKNMYSSEEKSTAISYRIINDNLPKFIDNIETFKIIKKTEFYSLFNNIYSELEPWLNISSIDEIFELTYLNEVLSQSQIEEYNFIIGGRSGEDRNDKIRGLNQYINEYNQKHEKKDRLPKFKMLYKQILSDREKISFLPESFENVNDLFVSVETYYKSNLLCVKNENNEEINIFDELSKLMSEISSYDLSKIYIKNDKNITDISQKLFGNYGVITSSINYYYESFINPNYKDDYARAKTESKRDRIEKDKEKYTKQKYLSLLEIQEAIKKYLEYTNEYSDSVVSYDKCLINYFSKIFDEKDKTNKIKDVYDKYTLLEPVLNVSYPETKKLSKNEKKLLKDFLDAILEIEHLVKPIYITSDEYSENDLTFYSQFNELYSHLDLLISLYNKVRSFVTKKPYSTEKIKLNFNSPTLLNGWDKNKEQDNLGIILIKNEKYYLGIISHKNRFIIDDFCTDASMENGYKKVVYRQIADASKDLPNLIEVNEKTIRKTGRKNDKGVNVILEEFKETYLPKKINQIRKSESYKISSKNFSKEDLTAYIDYYMQRIIAYKSDFTFIFKKPEEYNSYTEFIKDIDRQKYYLSYEYISYEDIKSLVDTGKLYLFQIYNKDFSASSKGKKNLHTMYWKALFDEKNLKDIVYKLNGQAEIFYRKASIPQESIVRHQKGDEMEFKNPLRNGNGERFKYEIVKDRRYTVDKFQFHVPITMNFKSPGDFKINSEVRKYIRNNPDVNILGVDRGERNLIYISLIDQKGNVIFDEDGKPIQYSLNTIESKYKKGDETVTFKTPYHTLLDEREKSRKQARQQWDDIEGIKELKDGYISQVVSLVTRLMVKYNAILVMEDLNFGFKKGRIRVEKQVYQKFEKMLIDKLNYLVFKDSKPGEVGELYNALQLTNKFTSFSSLGKQTGFIFYVPAWDTSKIDPVTGFVNLFPRCNTVKERQEFFNKFDFIKFDGENFVFSFDYDNFTSRATETKTKWTISTQGGERYFWNNRADNGKGATEKINVTEAMKKSLSEAGIQLEKDMDLKEKISSLDGKYIGKIYRLFNIVLAMRYSKDEEDFILSPVADENGKFFDSRNAANNLPKDADANGAYNIARKGLWYIMQLNDASGDLMKTNLAITNKEWLSFAQNKPYLDN

SEQ ID NO: 1719 - protein, 1230 aa, unidentified
  REGION 1..1230: note = Category: MG79 effectors
  REGION 1..1230: note = Description: MG79-2 effector
  source 1..1230: note = uncultivated organism sequence
MKDFNQFTNLYQQSKTLRFELKPVGDTLTHIQKNGILDRDYARAENYRKMKKTIDEYHKDFIDRALRGTNLDGLDAFAKLYAASVEEKRTEKWKKEYASCKQALRKEIAECFKRQAGFSDLDRKELIRNRLKAWIDQNQSDLFYTEEFYEFTTYFTGYNQNRMNMYSDEEKATAISHRLVDENLPKFLDNAAAFRKLKDSPVADHFSQLCADMEPWLNRSSLDDVFSVPHFNSVLTQAEIDAYNVLLGGRREEDRKLRGLNEYINLYNQKHPDAKLPRMKMLYKQILSDRESISWLPMEFRNAVELLEAVSGYSREAVDTVARAESALLELPNCDLTHVYVRGDALGAISSKLFGVYYVLSDALGLEDREDYYSMAELQTALDGYAKTVDRSVIPNADALVPDCLIAYFKNGLLQLAKDLHEALDKATPLLQIQQPEDYSLSQSDKSQLKSFLDAAMEILHFLKPLYLPADSELEKDDVFYGAFAPVYEDLQPITKLYDMVRNFATKKPYSTEKVKLNFDCSTLLDGWDTNKETQNLGVLFLRDGCYYLGIMDKRHNRVMEKAEGSQEEECYQKVQYKLLPGANKMFPKVFFSKSRINEFAPNEEIMRIYKSGSYKKGANFSLKDCHTLVDFYKASIQKHPEWKQFEFRFSPTESYQDINGFFQEVDKQGYRLTYTPVSAAYIDALVREGKLYLFQIYNKDFSPYSKGRPNLHTMYWKALFSEENLRDVVYKLNGKAEVFYRKRSISDANLVIHPAGQPIAKKNPMLSGQSSCFTYGITKDRRYTVDKFQFHVPITMNFKASGAVPINEVNKKVCAYIKNNPDVNIIGIDRGERHLLYISLIDRNGRVVKDENGCDIQYSLNTVTGSYRSSDGRPVGFETPYHDLLDQKEHERQAARQNWDTVENIKELKEGYLSQIVYHIAKMMVRYHAIVVLEDLNSGFKRGRIKVEKQVYQNFEKALIEKLNYLVFKDAEEGQPGDLYHALQLTEKFESFKKLTKQSGFLFYVPAWNTSKIDPVTGFADLLKPRYTNVNDAKAFFNKFKRISYDARNDWFCFSFDYRDFTQKAGESRAEWELCTFGAERYAFNRNLNGSRGGYEKWNLTERLKKLFEDYGIDFRRENLENAITMQTKAPFFSSLIKILQVLLAMRYSSAEDGRDFILSPVMGPDGSFFCSENLTPGLPADADANGAFNIARKGLWVLQQIDRAEKYTDWTTKVQNTQWLSFVQQLTP

SEQ ID NO: 1720 - protein, 1332 aa, unidentified
  REGION 1..1332: note = Category: MG79 effectors
  REGION 1..1332: note = Description: MG79-3 effector
  source 1..1332: note = uncultivated organism sequence
MREKNSGLEQFTNLYSLSKTLRFELIPVEGTAEAIQQNGILAEDKKLADSYQKIKPTLDAFHRAFIDRCLSEVKLENLDRYYDLYHVGDEEKRTKKYQDEFKSVKNALRKEVVSYFKKDKRYPKGLFGKELLKTHLPKWIEETGEDWYQDESFVNFTTYFSGYNENRENMYKDKEQSTSIAYRMIDENLPKFVYNMRLFNRLSDTDISGSFSVISEELAPFIFTSSLEEMFELSTFNKLMTQDHIDALNTIIGGYKEGEKVVKGLNGYINEYNQAHPKNRLPMMQMLYKQILSESNSASWLPDAFDSAAELFSGMNNFCDCGLRMNENPSLLEEMKKVLQEIKACDAAGIYIRNDSSINTISNAIFGHYGVIRNALETYYECQVFPEYRKRLISAKSAKSAEKIKKAKETYVTGTGYFSVREIQDALELYIDTAELGSNPEIKNRYFKDCISVYLAEGSATYVSRIKEAYNNVSGMIKASYASDYRLNEDDKDGLKHFLDAVLSLLHYCKPLYVKAEAGIKVDEVFYGQFNPLYEQLQTVTVIYDKVRNYATQKPYSEEKIKLNFGIKGNFLSGWVESKTDASDNGTQYGGYLFRKRNYIGEYDYYLGISSNSKLFRYFNSISAEEASKYERLNYYQPKEQSVYGSAYKGRHSYADDKALLMSTILDFMKKTKDTEFYEGFLAYSQTDLATPSGCLSRIKEFSTELYENLLRDEKFKDANEEVMQALKATIHSMGRLKGTEAVTERQYGVFTEMMNDINTLMSNNVYQYSAVSETELREALQDKKKPLYLFRITNKDLAYAERLEQGKDRKHRGRDNLHTMYFKALMSGEQNVYDIGSGTVFYRPASIARKVTHPAGIPINSKNPNLKDHKNIFEYDLIKDRRFTEDKFQFHLSIIQNYSASGIKSSDYNEKVCQYLRNNPNVNILGIDRGERNLLYISMIDRNGNIVRDENGQLIQYSLNNLTGEYTNASGEIVKFTTPYHTLLDRREKDNADNQRSWGTIGKIKDLKAGYMSQVISHITRLMVKYNAIIVMEDLNSRFINSRRKVDKQVYQNFERALIEKLNYLVFKDIPVEESGGLYNALQLADRFTSFRDLQKQSGFIFYIPAWNTSRIDPVTGFVNLLKPKSDNLKQARDFFGKYESICFNSKSDWFEFAFDYSNFLSGADYLKSRWTVCTHGDCRYIYDKKMNNNKGGYKKINVTKTIKELFNEYGIDYAEGDDLKEQIVSQNRTAFFSKLIECLKVTLAMRYSNGDGGRDFILSPVADENGHFFNSEEAAANRDDLPWDADANGAYNIARKGLLVLRNIDKSDSVKDWTTKISNREWLEFAQSFN

SEQ ID NO: 1721 - protein, 1227 aa, unidentified
  REGION 1..1227: note = Category: MG79 effectors
  REGION 1..1227: note = Description: MG79-4 effector
  source 1..1227: note = uncultivated organism sequence
MNDLSLFTNLYPKSKTLRFELKPVGETLENIQRSGIIERDTARAESYRKMKKTIDAFHKSFIDRALTKANLTKLDEFDALYRASADEKRTDEWKKAFDSCKQALRKEIVAYFIIQEDFSDLNKKELIRNRLKTWIDQNHSDLYFTEEFRDFTTYFTGYNENRMNMYSDQEKATAVSHRLIDENLPKFLDNIAVYNKVKASPVAERFAQVCTDMEPWLNVASLDDVFSVSYYNCTLTQLQIDAYNVLLGGWRNGDQKRQGLNEYINLYNQTHPDAKLPQMKMLYKQILSDRESISWLPAEFENASELLDVVQAFSESLKSPVENAGRILWELPGCDKSKVYVRGDALGKISAGLFGAYHVISDALGEEERVDYYALDTLQSALLAYAETTDHEMIPNGEAIKPDCISQYYVQGIQALSDALNASYSDVADLLNTAHTAEYRLSQTDKAKLKAYLDAAMEILHFLKPLYLPSDFELEKDEVFYGAFAPVYEELQPMTKLYDMVRNYATKKPFSTEKVKLNFDCSTLLDGWDVNRETQNLGVLFLRGGNYYLGIMDKRNNRILEQVEASSEEGCYQKVQYKLLPGPNKMLPKVFFSKSRIAEFAPSEEVLRIYKSGSFKKGSAFSREDCHTLIDFYKSSIQKHPEWSQFGFCFSPTETYEDISGFFREISEQGYKLSYLPVSSSYVDELVRDGKLYLFQIYNKDFSPYSKGRPNLHTMYWKALFSEENLRDVVYKLNGQAEVFYRKRSISDDDLVTHPANQPIAKKNPALAGQNSTFSYDIVKDRRYAVDKFQFHVPITMNFKAGGTARINEKVCAYLKNNPDVNIIGIDRGERHLLYVSMIDRNGRVVRDENGKYIQYSLNTITGCYRDSAGKQVAFETPYHDLLDQKERERQSARQNWDTVETIKELKEGYMSQVVHHIARLMVKYNAVVVMEDLNSGFKRSRIKVEKQVYQNFEKALIEKLNYLVFKDTPADHPGGLYHALQLTESFESFKKLTKQSGFLFYVPAWNTSKIDPVTGFVDLLKPKYTNAVAAKAFFSKFQGISFDPENDWFRFRFDYRDFTEKAGESRTEWELCTAGELRYAFNRKLNGNHGGYEQWNVTERLKTLFDRYGVDWRTGDLRKAITERTEAPFFAALVKNLQVLLAMRYSCAEDGKDFILSPVAGPDGAFFCSENGMPGLPQDADANGAYNIARKGLWVLRQIDRAESFNDWTTKVQNAQWLTFVQELTP

SEQ ID NO: 1722 - protein, 1233 aa, unidentified
  REGION 1..1233: note = Category: MG79 effectors
  REGION 1..1233: note = Description: MG79-5 effector
  source 1..1233: note = uncultivated organism sequence
MKDLSTFISQYDVSKTLRFELIPTPETEKHIREKGILDADEKLAVSYKRMKETMDEFHKDFIDRALSTAQLRHIDEYCALYWADAEEKNSKKYADRLKAASAELRKEIVQCFDADDAFKKIDKKEFIKDELETWINEKHPMLYYDPDFKKFTTYFEGYRKNRMNLYSDEEKVGSVAYRLIGENLPKFLDNIRIYEKVKASKVAGKFSKLCKDMEQYMNGRSLDEMFSARAYPSTLTQTQIDQYNTVIGGRNDGSSKLQGLNEYINLYNQQHPDAKLPIFKMLYKQLLSDRISASWLPEAFDSAQALFDGVEAFAQEVLTDTVLNDLQTVLNELPERDAALIYVRKSSVNDISSRLFGYYSVFNDALDAMGENEKTGYISLARLQSAVDGYIPTLDKDEYESIVSEYAPNCVTACFFDNLHEYIENISDAYEALRPCFGVEHDENYQLSEKERTWLKAYLDGVIALLHFIKPLYIDKDFALEKDEVFYSDFMPLYEKLSQVTKLYDKVRSFASKKPYSTKKIKLNFGCSTLLSGWDVNKETQNLGVLLIKDGNYYLGIMDKANNKLFSDAPECQSEDCYQKVVYKLLQEPYKMLPKVFFSKSRINEFAPSEEIISIRINETFKKGPKFIAADCHKLVDFYKTSISKHPDWRRFEFKFSPTGTYVDINDFYQEVAEQGYKLFFKPVSTAYIDSAVSEGKLYLFRIYNKDFSPSAKGKPNLHTMYWKALFDEKNLADVVYKLSGHGEVFYRSRSIDDEKRVIHPANKPIDKRNSGMSGETSVFDYDIIKDRRYTVDKFQFHVPISLNFKAHGVSNFNEKVCTYLKNNPDVNIIGIDRGERNLLYISMIDRSGRVVKDSRGNYIQYSLNTITGEYKNADGAPVKFSTPYHELLDKKEKNRREARENWGDIESIKELKAGYMSQVVYHISRLMVEYNAIVVMEDLNSGFKNGRKKVEKQVYQNFEKALIEKLNYLVFKDYPVDTCGGLYRALQLTDKFKSFGMLTKQTGFLFYVPAWNTSKIDPVTGFVDMLKPKYKSIPDARVFFSKFNYIRYNDQKDWFEFSFDYGNFTDRADGTKTDWTLCTYGSLRYAYNKSLNNGHGGYEKWNVTDKLKALFSANGIEYADGKDLKTKITAQNKADFYAILVKCLQVTLAMRYSSVEDGKDFILSPVADENGVFFCSEGRNDGLPQDADANGAYNIARKGLCVLEHIDVAEKYSDWSTKISNKEWLNFVQTRA

SEQ ID NO: 1723 - protein, 1316 aa, unidentified
  REGION 1..1316: note = Category: MG80 effectors
  REGION 1..1316: note = Description: MG80-1 effector
  source 1..1316: note = uncultivated organism sequence
MSRATGGGGAFESLMNMLKRRRIWGMGIFDKFVRQYSLSKTLRFELKPVGKTLENMRNHLGFDEKLQTFFADQEIKDAYMTLKPIFDSIHEKFITESLASSVAKKINFLEYFKKYKNRKELGEKEFQNIEKQLRTKFNDAYIEAAESLRKKAGKDEKGKYVLRDASYKVLTEQGILKYIAKNTVEFGNIESREKIDHALKAFEGFFTYFGGFNQNRENYYETGKEASTAVATRVVHENLPKFCDNVLFFEAHTDGYKQIHGYLKKKGRNLVNKKGVTLFPIAKDVFEISYFSKCLSQNEIETYNDAIGNANFLINLYNQALSEGKKSLPLPFFKTLFKQIGCGKRDALFFTITHDTKADANKARVKKAEAFSVEEVLELAAGAGEKYFSGTSDDGMINTVPEFLEHLRHRTDYRGIYWKRAAVNTVAGKYFAGWVDIKEHLLKEKVFHKNSGSGEIVVPEVVELNGLFKALSKVENWKNILFKPSIIKEKDQGKIIERSQYVSQAVLGLVERDIELRKSEFLAGSFAVLSSKRYKKPNEIEKIKSWMDGGLAVIQMLKYFDVRENKAKGDPIDSMLSEGLNNLVRAKDAPWFMWYDGLRNYLTRKPQEGTKDNKLKLNFENSTLGDGWDVNKEPDNYCVLLQDSNKHYFLAVITRQKDIKGYNKIFVKDEQNELFSTRGSNEWKKIEYKLLPGPNKMLPKCLLPGNNRTKYGATETVLDIYDKGGFKKNESSFSPSSLGKIIDFYKEALKKYEDWRCFNFSFKETASYKDISQFYLDVERQGYKLDMIDINKSVLDHWVDEGMIYLFAINNQDYNRGKRVGHKNNLQTTYWNAIFKILENRPKLNGGAEIFYRRALASDQLEKVSDKDSNLKHFRFSKEKFMFHVPITLNPTLKNPRMNNLINDTLKKQKDVNFLGIDRGEKHLAYYSLIDRNGNIKEQGTLNMPFLDKQGKQRIIKADKRTIGEDEKEQIKIVDCKDYNDLLDARAGDRDYARLNWQAIRTIKELKDGYISQVVRKICDLAIQHNALIILEDLNTGFKRGRQKIEKSVYQKLELALAKKLNFLVDKNAKIGELGSVTNALQLTPLISNFGDIENRKQVGIMLYVRANYTSQTDPITGWRRSIYLKNGSEKSIKEQILKYFTDFGFKDDDYYFTYKDENKNWTLFSGTKGKGLDRFRRRMGLKKDTWTIEKQDIVKILDEVFIGFDKERSFYSQIKAGKELHGWGNLRFAIEMIQQIRNTGTTDADDDFIVSPVRDATGNHFDSRRAKKNQPDSGDANGAYNIARKGIMMLDRIASDENPYIRDSEWDAWLSKNSR

SEQ ID NO: 1724 - protein, 741 aa, unidentified
  REGION 1..741: note = Category: MG81 effectors
  REGION 1..741: note = Description: MG81-1 effector
  source 1..741: note = uncultivated organism sequence
MPIISPGNQESNADGAIELRIAADIDETTGCTFSATGLPDGLEFERKKFEDDEEHTWQTGRIIGTPKRAGIYQVTVTAIDKAGTKTTASFVWTVCAMRAYRFALDLSDPQITAMQQHAGTARWAYNKALEAKVNAHRAYTERLKALLASGLTPQQAKAQMKKESAALKAQTAIWEHHRQCLTAMNLGRALPAKTPRGPQELIDDLAAIRAMVPDGVDPALLTLVGNWKGQPPTALCWARDRHEARQKWIKTHLVMARQTVTHLKQQLFDLGDTIPNMIENLANWRNTRDLPKEEGGSPWWQEVSSYVFSGGMGRADAAWSNWLKSLSGQRAGKAVGYPRFKKRGQCADSFPLFHDVTNPSIRIEGYRHLRLPNIGEVRVHNSGHRSGTRNRVTATNAKGVKRTVSGQSKGRLGSTKRLVRMIERGDAIVQSVTVVRGGHRWYANVLVKLTPEAMRQREMVARAHQKVSKKRAQGRGNVGVEWGVRTLATLSNGESFANPKPGKKNQRRLRVASQKVSRKPHKRGQPISANRAAAIRQLGRVHHEIAETRKGNHHQISAAISLGYRGVAVRGLDVKSMTKSAKGTVEKPGKHVKVKSTFNRAALDAAPGMLQNQISYKTTQYGAKFGVAPKDLPSSQTCSACGWRDPSIPLTQMTFRCGNVECGKKIDREVNAARNIRNSVFPVASDSGDTLNACVDGIGPPGSRGQPSPKQEDPEPHPPPEDGPAEGHSGEAIPRRSHTPG

SEQ ID NO: 1725 - protein, 607 aa, unidentified
  REGION 1..607: note = Category: MG81 effectors
  REGION 1..607: note = Description: MG81-3 effector
  source 1..607: note = uncultivated organism sequence
MPTEPRLIQKAYKFALDPTPTQARAFASHAGGARFAYNWGISTYAAALDARKAQTDAGQDPTVDVPNHFALCKAWTQYKDTYRLTGDPDGRPVHWVEDNFVGTYQAALRDAHGAWQKMWDSRNGQRKGRAVGRPRFKKKGRSPDSFQMHGDSLRLDSGRALRPADATARKPLNRAERAKLAPTPGMTPTERSAAQKRLRAGRKARAGHVHGPQVSQSGTIYVNLPKVGPVRVPGRVRIPQVTPSVAGWVDRNSRTARKLLRQLAKAATTGPVVCPTCAGTGTVTVTTKKGERRDTKCGKYHPTVRPEDKLPGCQGKGKVEPARIVRATISRGASGTWWCSITTEQVITVPVITTRRPAHPTRRQLADGSIGVDLGVKYLAVLSTGDTYMNSRFLDSALTDLKRMQKVLSRTAKDSHRRLKARRRVGTLHEQVALMRRDATNRVTTELARKYATISVEGWDAQRLAELGSKDLPKRLRRNRNRALADAAPGMLRWQLEYKTSWYGSTLFKGEPHWETGRICSVCGTARTKPVPLAEEQFRCPQGHVLPRRVNSARVMDRVARGLVAAPATPEPRGGDVRPATPRRGGPSPAKRVARSRKRGKTGTPDP

SEQ ID NO: 1726 - protein, 632 aa, unidentified
  REGION 1..632: note = Category: MG81 effectors
  REGION 1..632: note = Description: MG81-4 effector
  source 1..632: note = uncultivated organism sequence
MTTETVMQQLAFKVALDPTPRQARAMGSHAGGARFAYNWGIARIAEALKQREAERQAGGEPTTPVPDHFALCKLWTQWKDTAEWVDRATGEVTRGVPWVAENFVGTYQAALRDAARAWANYFDSRTGQRAGRAIGKPRFKSKRTARKSFQVHGSSLRLVSAVKVNLPKIGTVTVMSDDSRHPAMARSRRRVPGQRHMGNRRRSRQLWQRLRHGQALAERAAEILSAAYADGNPDRVLEHLTALADERARARAVAAAEERLQKAKAAAAKAKPEKREKAQQRVAQAEEALRRAQAITANRKDGWSARKLAEVCRTGLITPVQAADLAEVFGLGEQQRAALAEAALQPRLVKATVTLGADGLWWLSLSAEVPVRVRTSPSRRQRERGATGLDLGVRNVVTSSKRLGGDQNLPNPRYLEQALVELRAAQKHLSRCTPGSARHAKAKARVGLIHADVARLREQHHHRLSTRLVRTFAGIAVEGYDLQELARRGSEGLPGEVRRRRNRALADTGAGMLRQQLQYKTARYGSHLVVAEPDAPTGRTCATCGQAKAKPVPPYHEVFACEACGRTRPRRLNTALALEAVAASSGSPHGGSDQPRGEDVRPAASRRGGQSSMKRAARSRPPGRGQTGTPGP

SEQ ID NO: 1727 - protein, 545 aa, unidentified
  REGION 1..545: note = Category: MG81 effectors
  REGION 1..545: note = Description: MG81-5 effector
  source 1..545: note = uncultivated organism sequence
MATTDKKDKDREKLRAYKFRLDPNQAQTTALYQAVGAARYTYNMLTAYNSEVNRLRDDYWKKRHDEGISDADIKKELKALAKEDKRYKQLKYGAFSTQYLTPERDRHKDAALRIKNGEDPSVVWNQETERSANPWLHTVNRRVLVSGLQNASDAWDNFWDSRMGKRAGRLVGTPRFKKKGVSRDSFTVPAAKEKEKMGAYGAAYLRGEPAYKQGRRKITDYRHVRLSYLGTIRTFNSTKPLVKAVAAGAKIRSYTVSRNADRWYVSFLVKFSEPIRRSATKRARAAGSVGVDLGVKYLASLSDSEAPQRFPNLKFVEGLPSLENPRWSGTSSRRLRKLQRALARSQKGSNRRSRLVKQIARLHHMTALRRESNLHQLTKKLATGYTLVGFEDLNVSGMTASAKGTVENPGKNVAQKSGLNRVVLDAAFGVFRNQLEYKAVWYGSAFEKVNRYFASSQTCSECGRKAKTKLTLRDRVFDCVYCGNMMDRDFNAAVNICREAQRLFDEKLASEDGESLNGRGSRGALRGAKTVEASRPPASHRRGSP

SEQ ID NO: 1728 - protein, 512 aa, unidentified
  REGION 1..512: note = Category: MG81 effectors
  REGION 1..512: note = Description: MG81-6 effector
  source 1..512: note = uncultivated organism sequence
MPTKQKEDSNRCVLTLPLLTEPWQEHIIEKRFKIIEHLKNQLISIELRKLKKLQRTKAYKNLIKQIESVPKSERTALYKERNKMLKDAGFSQYTFMDDMAGKKSLMQKHFESHINVQIAHKAAIDVWSSFEKFLFGTGQIVHYQKRGTLSSVASKSPKTGMFYYSDENIFKWSGGGTKPKGGIILCLRVASVKTNYEKEMVANNEIKYYRVVRKWMKTKYKYYLQITFAGKPADKHREISTGRVGIDIGTQTIAIASDKSVKLLELADKVNKNHIKKCELQRKLDRSRRYTNPDNFNPDGTVKRGTKGHKLKWNKSKHYIEIAGKIRELERKNADIRKYQHTCLANDILAMGNQIYIEPMNYKGLQKRAKETQVDEKGRYKKKKRFGKSLANKAPAMFVTILKTKAEQHGGEVYEVDIMSYRASQCDHTTGEYTKHGLNDRWRILGNGDKVQRDLYSAFLIKNSNKTHDEIDLDKCSKTYDNFKKLHDTEIENIRNEVKLRERKNISSYGIA

SEQ ID NO: 1729 - protein, 512 aa, unidentified
  REGION 1..512: note = Category: MG81 effectors
  REGION 1..512: note = Description: MG81-7 effector
  source 1..512: note = uncultivated organism sequence
MPAKQKEGGNRCVLTLPLLTELWQEHIIEKRFKIIEHLKNQLISIELRKLKNLQRTKAYKNLIKQIESVPKSERTVLYKERNKMLKDAGFSQYTFMDDMAGKKSLMQKHFESHINVQIAHKAAIDVWSSFEKFLFGTGQIVHYQKRGTLSSVASKSPKTGMFYYSDENIFKWSGGGTKPKGGIILCLRVASVKTNYEKEMVANNEIKYYRVVRKWMKTKYKYYLQITFAGKPADKHREISTGRVGIDIGTQTIAIASDKSVKLLELADKVNKNHIKKCELQRKLDRSRRYTNPDNFNPDGTVKRGTKGHKLKWNKSKHYLEIAGKIRELERKNADIRKYQHTCLANDILAMGNQIYIEPMNYKGLQKRVKETQVDEKGRYKKKKRFGKSLANKAPAMFVTILKTKAEQHGGEVYEVDIMSYRASQCDHTTGEYTKHGLNDRWRILGNGDKVQRDLYSAFLIKNSNKTHDEIDLDKCSKTYDNFKKLHDKEIENIRNEVILRKRRNISSYGIA

SEQ ID NO: 1730 - protein, 512 aa, unidentified
  REGION 1..512: note = Category: MG81 effectors
  REGION 1..512: note = Description: MG81-8 effector
  source 1..512: note = uncultivated organism sequence
MPTKQKEDSNRCVLTLPLLTEPWQEHIIEKRFKIIEHLKNQLISIELRKLKKLQRTKAYKNLIKQIESVPKSERTALYKERNKMLKDAGFSQYTFMDDMAGKKSLMQKHFESHINVQIAHKAAIDVWSSFEKFLFGTGQMIHYQKRGTLSSVASKSPKTGMFYYSDENIFKWSGGGTKPKGGIILCLRVASVKTNYEKEMVANNEIKYYRVVRKWMKTKYKYYLQITFAGKPADKHREISTGRVGIDIGTQTIAIASDKSVKLLELADKINKNHIKKCELQRKLDRSRRYTNPDNFNPDGTVKRGTKGHKLKWNKSKHYIEIAGKIRELERKNADIRKYQHTCLANDILAMGNQIYIEPMNYKGLQKRAKETQVDEKGRYKKKKRFGKSLANKAPAMFVTILKTKAEQHGGEVYEVDIMSYRASQCDHTTGEYTKHGLNDRWRILGNGDKVQRDLYSAFLIKNSNKTHDEIDLDKCSKTYDSFKKLHDKEIENIRNEVKLRERKNISSYGIA

SEQ ID NO: 1731 - protein, 512 aa, unidentified
  REGION 1..512: note = Category: MG81 effectors
  REGION 1..512: note = Description: MG81-9 effector
  source 1..512: note = uncultivated organism sequence
MPTKQKEGGNRCVLTLPLLTEPWQEHIIEKRFKIIEHLKNQLISIELRKLKNLQRTKAYKNLIKQIESVPKSERTALYKERNKMLKDAGFSQYTFMDDMAGKKSLMQKHFESHINVQIAHKAAIDVWSSFEKFLFGSGQMIHYQKRGTLSSVASKSPKTGMFYYSDENIFKWSGGGTKPKGGIILCLRVASVKTNYEKEMVANNEIKYYRVVRKWMKTKYKYYLQITFAGKPADKHREISTGRVGIDIGTQTIAIASDKSVKLLELADKVNKNHIKKCELQRKLDRSRRYTNPDNFNPEGTVKRGTKGHKLKWNKSKHYIEIAGKIRELERKNADIRKYQHTCLANDILAMGNQIYIEPMNYKGLQKRAKETQVDEKGRYKKKKRFGKSLANKAPAMFVTILKTKVEQHGGEVYEVDIMSYRASQCDHTTGEYTKHGLNDRWRILGNGDKVQRDLYSAFLIKNSNKTHDEIDLDKCSKTYDNFKKLHDKEIENIRNEVKLRERKNISSYGIA

SEQ ID NO: 1732 - protein, 512 aa, unidentified
  REGION 1..512: note = Category: MG81 effectors
  REGION 1..512: note = Description: MG81-10 effector
  source 1..512: note = uncultivated organism sequence
MPTKQKEDSNRCVLTLPLLTEPWQEHIIEKRFKIIEHLKNQLISIELRKLKKLQRTKAYKNLIKQIESVPKSERTALYKERNKMLKDAGFSQYTFMDDMAGKKSLMQKHFESHINVQIAHKAAIDVWSSFEKFLFGTGQMIHYQKRGTLSSVASKSPKTGMFYYSDENIFKWSGGGTKPKGGIILCLRVASVKTNYEKEMVANNEIKYYRVVRKWMKTKYNYYLQITFAGKPADKHREISTGRVGIDIGTQTIAIASDKSVKLLELADKINKNHIKKCELQRKLDRSRRYTNPDNFNPDGTVKRGTKGHKLKWNKSKHYIEIAGKIRELERKNADIRKYQHTCLANDILAMGNQIYIEPMNYKGLQKRAKETQVDEKGRYKKKKRFGKSLANKAPAMFVTILKTKAEQHGGEVYEVDIMSYRASQCDHTTGEYTKHGLNDRWRILGNGDKVQRDLYSAFLIKNSNKTHDEIDLDKCSKTYDSFKKLHDKEIENIRNEVKLRERKNISSYGIA

SEQ ID NO: 1733 - protein, 512 aa, unidentified
  REGION 1..512: note = Category: MG81 effectors
  REGION 1..512: note = Description: MG81-11 effector
  source 1..512: note = uncultivated organism sequence
MPTKQKEDSNRCVLTLPLLTEPWQEHIIEKRFKIIEHLKNQLISIELRKLKNLPRTKAYKNLMKRIESVPKSERTALYKERNKMLKDAGFSQYTFMDDMAGKKSLMQKHFESHINVQIAHKAAIDVWSSFEKFLFGSGQMIHYQKRGTLSSVASKSPKTGMFYYPDENIFKWSGGGTKPKGGIILCLRVASVKTNYEKEMIANNEIKYYRVVRKWMKTKYKYYLQITFAGKPADKHREISTGRVGIDIGTQTIAIASDKSVKLLELADKVNKNHIKKCELQRKLDRSRRYTNPDNFNPDGTVKRGTKGHKLKWNKSKHYLEIAGKIRELERKNADIRKYQHTCLANDILAMGNQIYIEPMNYKGLQKRAKETQVDEKGRYKKKKRFGKSLANKAPAMFVTILKTKAEQHGGEVYEVDIMSYRASQCDHTTGEYTKHGLNDRWRILGNGDKVQRDLYSAFLIKNSNKTHDEIDLDKCSKTYDSFKKLHDKEIENIRNEVKLRERKNISSYGIA

SEQ ID NO: 1734 - protein, 512 aa, unidentified
  REGION 1..512: note = Category: MG81 effectors
  REGION 1..512: note = Description: MG81-12 effector
  source 1..512: note = uncultivated organism sequence
MPTKQKEDSNRCVLTLPLLTEPWQEHIIEKRFKIIEHLKNQLISIELRKLKNLQRTKAYKNLIKQIESVPKSERTVLYKERNKMLKDAGFSQYTFMDDMAGKKSLMQKHFESHINVQIAHKAAIDVWSSFEKFLFGTDQMIHYQKRGTLSSVASKSPKTGMFYYSDENIFKWSGGGTKPKGGIILCLRVASVKTNYEKEMVANNEIKYYRVVRKWMKTKYKYYLQITFAGKPADKHREISTGRVGIDIGTQTIAIASDKSVKLLELADKVNKNHIKKCELQRKLDRSRRYTNPDNFNPDGTVKRGTKGHKLKWNKSKHYLEIAGKIRELERKNADIRKYQHTCLANDILAMGNQIYIEPMNYKGLQKRAKETQVDEKGRYKKKKRFGKSLANKAPAMFVTILKTKVEQHGGEVYEVDIMSYRASQCDHTTGEYTKHGLNDRWRILGNGDKVQRDLYSAFLIKNSNKTHDEIDLDKCSKTYDSFKKLHDKEIENIRNEVKLRERRNISSYGIA

SEQ ID NO: 1735 - protein, 512 aa, unidentified
  REGION 1..512: note = Category: MG81 effectors
  REGION 1..512: note = Description: MG81-13 effector
  source 1..512: note = uncultivated organism sequence
MPTKQKEGGNRCVLTLPLLTEPWQEHIIEKRFKIIEHLKNQLISIELRKLKNLQRTKAYKNLIKQIESVPKSERTALYKERNKMLKDAGFSQYTFMDDMAGKKSLMQKHFESHINVQIAHKAAIDVWSSFEKFLFGSGQMIHYQKRGTLSSVASKSPKTGMFYYSDENIFKWSGGGTKPKGGIILCLRVASVKTNYEKEMVANNEIKYYRVVRKWMKTKYKYYLQITFAGKPADKHREISTGRVGIDIGTQTIAIASDKSVKLLELADKVNKNHIKKCELQRKLDRSRRYTNPDNFNPDGTVKRGTKGHKLKWNKSKHYLEVAGKIRELERKNADIRKYQHTCLANDILAMGNQIYIEPMNYKGLQKRAKETQVDEKGRYKKKKRFGRSLANKAPAMFVTILKTKAEQHGGEVYEVDIMSYRASQCDHTTGEYTKHGLNDRWRILGNGDKVQRDLYSAFLIKNSNKTHDEIDLDKCSKTYDSFKKLHDKEIENIRNEVKLRERKNISSYGIA

SEQ ID NO: 1736 - protein, 531 aa, unidentified
  REGION 1..531: note = Category: MG81 effectors
  REGION 1..531: note = Description: MG81-14 effector
  source 1..531: note = uncultivated organism sequence
MILLAKNNNNNNNTDTCVLTLPLRVEKWQEDCLLKRFEAARRIYNSLLNFELKKLRQLERTVEYRQIQSVISSAYRSNTKDSPECKDAFKRREKLISANGISEYGFKSDVKFFYKHFDGLIGSNVAVHCIAVQLWAAFDKYLRGSGKEIHFKRLGDISSLKGYSVKGKSGGCEIIFRGQYIEWTRKKKKLLLPLKIDPDNEYEREMLSRRVKYVRIIKKPGKNRLRWYAQLTLEGKPALKYSAETGKPIHSVGKGNVGIDIGPQTVAYASDKEVALLELADRVTNIEHQKKKLQRKLDRSRRATNPDNYKPDGTIKRGVKLTRNKSKRYLKLQSKLAYIQHRQAEIRKLQHTCLANHMLTLGDRFFVEKMNWPGLAHRAKETSISEKTGRYKRKKRFGKSLANKAPAMFISILKRKCETLGLPGVVEVDTYSLKASQYNHLSDTYEKKSLSERWNYMPISDGSDSSKTKRIQRDLYSAFLLQHTIPQPCSFDKKALRIDYPNFVTMHDAEIHRLESLPKTITSMGVRRSHS

SEQ ID NO: 1737 - protein, 512 aa, unidentified
  REGION 1..512: note = Category: MG81 effectors
  REGION 1..512: note = Description: MG81-15 effector
  source 1..512: note = uncultivated organism sequence
MPTKQKEDINRCVLTLPLLTEPWQEHIIEKRFKIIEHLKNQLISIELRKIKNLQRTKAYKNLIKQIESVPKSERTALYKERNKMLKDAGFSQYTFMDDMAGKKSLMQKHFESHINVQIAHKAAIDVWSSFEKFLFGTGQIVHYQKRGTLSSVASKSPKTGMFYYSDENIFKWSGGGTKPKGGIILCLRVASVKTNYEKEMVANNEIKYYRVVRKWMKTKYKYYLQITFAGKPADKHREISTGRVGIDIGTQTIAIASDKSVKLLELADKVNKNHIKKCELQRKLDRSRRYTNPDNFNPDGTVKRGTKGHKLKWNKSKHYIEIAGKIRELERKNADIRKYQHTCLANDILAMGNQIYIEPMNYKGLQKRVKETQVDEKGRYKKKKRFGKSLANKAPAMFVTILKTKAEQHGGEVYEVDIMSYRASQCDHTTGEYTKHGLNDRWRILGNGDKVQRDLYSAFLIKNSNKTHDEIDLDKCSKTYDSFKKLHDKEIENIRNEVKLRERRNISSYGIA

SEQ ID NO: 1738 - protein, 512 aa, unidentified
  REGION 1..512: note = Category: MG81 effectors
  REGION 1..512: note = Description: MG81-16 effector
  source 1..512: note = uncultivated organism sequence
MPTKQKEGGNRCVLTLPLLTEPWQEHIIEKRFKIIEHLKNQLISIELRKLKNLQRTKAYKNLMKRIESVPKSERTALYKERNKMLKDAGFSQYTFMDDMAGKKSLMQKHFESHINVQIAHKAAIDVWSSFEKFLFGSGQMIHYQKRGTLSSVASKSPKTGMFYYSDENIFKWSGGGTKPKGGIILCLRVASVKTNYEKEMVANNEIKYYRVVRKWMKTKYKYYLQITFAGKPADKHREISTGRVGIDIGTQTIAIASDKSVKLLELADKVNKNHIKKCELQRKLDRSRRYTNPDNFNPDGTVKRGTKGHKLKWNKSKHYIEIAGKIRELERKNADIRKYQHTCLANDILTMGNQIYIEPMNYKGLQKRAKETQVDEKGRYKKKKRFGKSLANKAPAMFVTILKTKAEQHGGEVYEVDIMSYRASQCDHTTGEYTKHGLNDRWRILGNGDKVQRDLYSAFLIKNSNKTHDEIDLDKCSKTYDSFKKLHDKEIENIRNEVILRERRNISSYGIA

SEQ ID NO: 1739 - protein, 512 aa, unidentified
  REGION 1..512: note = Category: MG81 effectors
  REGION 1..512: note = Description: MG81-17 effector
  source 1..512: note = uncultivated organism sequence
MPTKQKEGGNRCVLTLPLLTEPWQEHIIEKRFKIIEHLKNQLISIELRKLKKLQRTKAYKNLIKQIESVPKSERTVLYKERNKMLKDAGFSQYTFMDDMAGKKSLMQKHFESHINVQIAHKAAIDVWSSFEKFLFGTGQIVHYQKRGTLSSVASKSPKTGMFYYSDENIFKWSGGGTKPKGGIILCLRVASVKTNYEKEMVANNEIKYYRVVRKWMKTKYKYYLQITFAGKPADKHREISTGRVGIDIGTQTIAIASDKSVKLLELADKVNKNHIKKCELQRKLDRSRRYTNPDNFNPDGTVKRGTKGHKLKWNKSKHYLEVAGKIRELERKNADIRKYQHTCLANDILAMGNQIYIEPMNYKGLQKRAKETQVDEKGRYKKKKRFGKSLANKAPAMFVTILKTKAEQHGGEVYEVDIMSYRASQCDHTTGEYTKHGLNDRWRILGNGDKVQRDLYSAFLIKNSNKTHDEIDLDKCSKTYDSFKKLHDKEIENIRNEVILRKRRNISSYGIA

SEQ ID NO: 1740 - protein, 530 aa, unidentified
  REGION 1..530: note = Category: MG81 effectors
  REGION 1..530: note = Description: MG81-18 effector
  source 1..530: note = uncultivated organism sequence
MILLANNNNNNNTDTCVLTLPLRVEKWQEDCLLKRFEAARRIYNSLLNFELKKLRQLERTVEYRQIQSVISSAYRSNTKDSPECKDALKRREKLISANGLAEYGFKSDVKFFYKHFDGLIGSNVAVHCIAVQLWAAFNKYLSGSGKEIHFKRLGEISSLKGYSVKGKSGGREIIFRGQYIEWTRKKKKLLLPLKIDPDNEYEREMLSRRVKYVRIIKKPGKNRLRWYAQLTLEGKPALKYSAETGKPIHSVGKGNVGIDIGPQTIAYASDKEVALLELADRVTNIEHQKKKLQRKLDRSRRATNPDNYKPDGTIKRGVKLTRNKSKRYLKLQSKLAYIQHRQAEIRKLQHTCLANHMLTLGDRFFVEKMNWSGLAHRAKETSISEKTGRYKRKKRFGKSLANKAPAMFISILKRKCETLGLPGVVEVDTYSLKASQYNHLSDTCEKKSLSERWNYMPISDGSDSSKTKRIQRDLYSAFLLQHTIPQPCSFDKEALRIDYPKFVIMHDAEIHRLESLPKTVTSMGVRRSHS

SEQ ID NO: 1741 - protein, 512 aa, unidentified
  REGION 1..512: note = Category: MG81 effectors
  REGION 1..512: note = Description: MG81-19 effector
  source 1..512: note = uncultivated organism sequence
MPTKQKEGGNRCVLTLPLLTEPWQEHIIEKRFKIIEHLKNQLISIELRKLKKLQRTKAYKNLIKQIESVPKSERTVLYKERNKMLKDAGFSQYTFMDDMAGKKSLMQKHFESHINVQIAHKAAIDVWSSFEKFLFGTGQIVHYQKRGTLSSVASKSPKTGMFYYSDENIFKWSGGGTKPKGGIILCLRVASVKTNYEKEMVANNEIKYYRVVRKWMKTKYKYYLQITFAGKPADKHREISTGRVGIDIGTQTIAIASDKSVKLLELADKVNKNHIKKCELQRKLDRSRQYTNPDNFNPDGTVKRGTKGHKLKWNKSKHYLEVAGKIRELERKNADIRKYQHTCLANDILAMGNQIYIEPMNYKGLQKRAKETQVDEKGRYKKKKRFGKSLANKAPAMFVTILKTKAEQHGGEVYEVDIMSYRASQCDHTTGEYTKHGLNDRWRILGNGDKVQRDLYSAFLIKNSNKTHDEIDLDKCSKTYDSFKKLHDKEIENIRNEVILRKRRNISSYGIA

SEQ ID NO: 1742 - protein, 512 aa, unidentified
  REGION 1..512: note = Category: MG81 effectors
  REGION 1..512: note = Description: MG81-20 effector
  source 1..512: note = uncultivated organism sequence
MPTKQKEGGNRCVLTLPLLTEPWQEHIIEKRFKIIEHLKNQLISIELRKLKKLQRTKAYKNLIKQIESVPKSERTVLYKERNKMLKDAGFSQYTFMDDMAGKKSLMQKHFESHINVQIAHKAAIDVWSSFEKFLFGTGQIVHYQKRGTLSSVASKSPKTGMFYYSDENIFKWSCGGTKPKGGIILCLRVASVKTNYEKEMVANNEIKYYRVVRKWMKTKYKYYLQITFAGKPADKHREISTGRVGIDIGTQTIAIASDKSVKLLELADKVNKNHIKKCELQRKLDRSRRYTNPDNFNPDGTVKRGTKGHKLKWNKSKHYLEVAGKIRELERKNADIRKYQHTCLANDILAMGNQIYIEPMNYKGLQKRAKETQVDEKGRYKKKKRFGKSLANKAPAMFVTILKTKAEQHGGEVYEVDIMSYRASQCDHTTGEYTKHGLNDRWRILGNGDKVQRDLYSAFLIKNSNKTHDEIDLDKCSKTYDSFKKLHDKEIENIRNEVILRKRRNISSYGIA

SEQ ID NO: 1743 - protein, 512 aa, unidentified
  REGION 1..512: note = Category: MG81 effectors
  REGION 1..512: note = Description: MG81-21 effector
  source 1..512: note = uncultivated organism sequence
MPTKQKEDSNRCVLTLPLLTEPWQEHIIEKRFKIIEHLKNQLISIELRKLKKLQRTKAYKNLIKQIESVPKSERTALYKERNKMLKDAGFSQYTFMDDMAGKKSLMQKHFESHINVQIAHKAAIDVWSSFEKFLFGTGQIVHYQKRGTLSSVASKSPKTGMFYYSDENIFKWSGGGTKPKGGIILCLRGASVKTNYEKEMVANNEIKYYRVVRKWMKTKYKYYLQITFAGKPADKHREISTGRVGIDIGTQTIAIASDKSVKLLELADKVNKNHIKKCELQRKLDRSRRYTNPDNFNPDGTVKRGTKGHKLKWNKSKHYIEIAGKIRELERKNADIRKYQHTCLANDILAMGNQIYIEPMNYKGLQKRAKETQVDEKGRYKKKKRFGKSLANKAPAMFVTILKTKAEQHGGEVYEVDIMSYRASQCDHTTGEYTKHGLNDRWRILGNGDKVQRDLYSAFLIKNSNKTHDEIDLDKCSKTYDNFKKLHDTEIENIRNEVKLRERKNISSYGIA

SEQ ID NO: 1744 - protein, 512 aa, unidentified
  REGION 1..512: note = Category: MG81 effectors
  REGION 1..512: note = Description: MG81-22 effector
  source 1..512: note = uncultivated organism sequence
MPTKQKEDSNRCVLTLPLLTEPWQEHIIEKRFKIIEHLKNQLISIELRKLKKLQRTKAYKNLIKQIESVPKSERTVLYKKRNKMLKDAGFSQYTFMDDMAGKKSLMQKHFESHINVQIAHKAAIDVWSSFEKFLFGSGQMIHYQKRGTLSSVASKSPKTGMFYYSDENIFKWSGGGTKPKGGIILCLRVASVKTNYEKEMVANNEIKYYRVVRKWMKTKYKYYLQITFAGKPADKHHEVSTDRVGIDIGTQTIAIASDKSVKLLELADKVNKNHIKKCELQRKLDRSRRYTNPDNFNPDGTVKRGTKGHKLKWNKSKHYIEIAGKIRELERKNADIRKYQHTCLANDILAMGNQIYIEPMNYKGLQKRAKETQVDEKGRYKKKKRFGKSLANKAPAMFVTILKTKAEQHGGEVYEVDIMSYRASQCDHTTGEYTKHGLNDRWRILGNGDKVQRDLYSAFLIKNSNKTHDEIDLDKCSKTYDNFKKLHDKEIENIRNEVILRKRRNISSYGIA

SEQ ID NO: 1745 - protein, 528 aa, unidentified
  REGION 1..528: note = Category: MG81 effectors
  REGION 1..528: note = Description: MG81-23 effector
  source 1..528: note = uncultivated organism sequence
MILLTKNNNNTDTCVLTLPLRVEKWQEDCLLKRFEAARRIYNSLLNFELKKLRQLERTVEYRQIQSVISSAYRSNTKDSPECKDAFKRREKLISANGISEYGFKSDVKFFYKHFDGLIGSNVAVHCIAVQLWAAFDKYLRGSGKEIHFKRLGDISSLKGYSVKGKSGGCEIIFRGQYIEWTRKKKKLLLPLKIDPDNEYEREMLSRRVKYVRIIKKPGKNRLRWYAQLTLEGKPALKYSAETGKPIHSVGKGNVGIDIGPQTVAYASDKEVALLELADRVTNIEHQKKKLQRKLDRSRRATNPDNYKPDGTIKRGVKLTRNKSKRYLKLQSKLAYIQHRQAEIRKLQHTCLANHMLTLGDRFFVEKMNWPGLAHRAKETSISEKTGRYKRKKRFGKSLANKAPAMFISILKRKCETLGLPGVVEVDTYSLKASQYNHLSDTYEKKSLSERWNYMPISDGSDSSKTKRIQRDLYSAFLLQHTIPQPCSFDKKALRIDYPNFVTMHDAEIHRLESLPKTITSMGVRRSHS

SEQ ID NO: 1746 - protein, 512 aa, unidentified
  REGION 1..512: note = Category: MG81 effectors
  REGION 1..512: note = Description: MG81-24 effector
  source 1..512: note = uncultivated organism sequence
MPTKQKEDSNRCVLTLPLLTEPWQEHIIEKRFKIIEHLKNQLISIELRKLKNLQRTKAYKNLIKQIESVPKSERTVLYKERNKMLKDAGFSQYTFMDDMAGKKSLMQKHFESHINVQIAHKAAIDVWSSFEKFLFGTGQIVHYQKRGTLSSVASKSPKTGMFYYSDENIFKWSGGGTKPKGGIILCLRVASVKTNYEKEMVANNEIKYYRVVRKWMKTKYKYYLQITFAGKPADKHREISTGRIGIDIGTQTIAIASDKSVKLLELADKVNKNHIKKCELQRKLDRSRRYTNPDNFNPDGTVKRGTKGHKLKWNKSKHYIEIAGKIRELERKNADIRKYQHTCLANDILAMGNQIYIEPMNYKGLQKRVKETQVDEKGRYKKKKRFGKSLANKAPAMFVTILKTKAEQHGGEVYEVDIMSYRASQCDHTTGEYTKHGLNDRWRILGNGDKVQRDLYSAFLIKNSNKTHDEIDLDKCSKTYDSFKKLHDKEIENIRNEVKLRERKNISSYGIA

SEQ ID NO: 1747 - protein, 512 aa, unidentified
  REGION 1..512: note = Category: MG81 effectors
  REGION 1..512: note = Description: MG81-25 effector
  source 1..512: note = uncultivated organism sequence
MPTKQKEGGNRCVLTLPLLTEPWQEHIIEKRFKIIEHLKNQLISIELRKLKNLQRTKAYKNLIKQIESVPKSERTALYKERNKMLKDAGFSQYTFMDDMAGKKSLMQKHFESHINVQIAHKAAIDVWSSFEKFLFGTGQIVHYQKRGTLSSVASKSPKTGMFYYPDENIFKWSGGGTKPKGGIILCLRVASVKTNYEKEMVANNEIKYYRVVRKWMKTKYKYYLQITFAGKPADKHREISTGRVGIDIGTQTIAIASDKSVKLLELADKVNKNHIKKCELQRKLDRSRRYTNPDNFNPDGTVKRGTKGHKLKWNKSKHYIEIAGKIRELERKNADIRKYQHTCLANDILAMGNQIYIEPMNYKGLQKRAKETQVDEKGRYKKKKRFGKSLANKAPAMFVTILKTKAEQHGGEVYEVDIMSYRASQCDHTTGEYTKHGLNDRWRILGNGDKVQRDLYSAFLIKNSNKTHDAIDLDKCSKTYDSFKKLHDKEIENIRNEVKLRERKNISSYGIA

SEQ ID NO: 1748 - protein, 512 aa, unidentified
  REGION 1..512: note = Category: MG81 effectors
  REGION 1..512: note = Description: MG81-26 effector
  source 1..512: note = uncultivated organism sequence
MPTKQKEDSNRCVLTLPLLTEPWQEHIIEKRFKIIEHLKNQLISIELRKLKNLQRTKAYKNLMKRIESVPKSERTALYKERNKMLEGKGFSQYTFMDDMAGKKSLMQKHFESHINVQIAHKAAIDVWSSFEKFLFGSGQMIHYQKRGTLSSVASKSPKTGMFYYPDENIFKWSGGGTKPKGGIILCLRVASVKTNYEKEMVANNEIKYYRVVRKWMKTKYKYYLQITFAGKPADKHREISTGRVGIDIGTQTIAIASDKSVKLLELADKVNKNHIKKCELQRKLDRSRRYTNPDNFNPDGTVKRGTKGHKLKWNKSKHYLEIAGKIRELERKNADIRKYQHTCLANDILAMGNQIYIEPMNYKGLQKRAKETQVDEKGRYKKKKRFGKSLANKAPAMFVTILKTKAEQHGGEVYEVDIMSYRASQCDHTTGEYTKHGLNDRWRILGNGDKVQRDLYSAFLIKNSNKTHDEIDLDKCSKTYDSFKKLHDKEIENIRNEVKLRERKNISSYGIA

SEQ ID NO: 1749 - protein, 527 aa, unidentified
  REGION 1..527: note = Category: MG81 effectors
  REGION 1..527: note = Description: MG81-27 effector
  source 1..527: note = uncultivated organism sequence
MAKNNNNNNTDTCVLTLPLRVEKWQEDCLLKRFEAARRIYNSLLNFELKKLRQLERTVEYRQIQSVISSAYRSNTKDSPECKDAFKRREKLISANGISEYGFKSDVKFFYKHFDGLIGSSVAVHCIAVQLWAAFDKYLRGSGKEIHFKRLGEISSLKGYSVKGKSGGLEIIFRGQYIEWTRKKKKLLLPLKIDPDNEYEREMLSRRVKYVRIIKKPGKNRLRWYAQLTLEGKPALKYSAETGKPIHSVGKGNVGIDIGPQTVAYASDKEVALLELADRVTNIEHQKKKLQRKLDRSRRATNPDNYKPDGTIKRGVKLTRNKSKRYLKLQSKLAYIQHRQAEIRKLQHTCLANHMLTLGDRFFVEKMNWPGLAHRAKETSISEKTGRYKRKKRFGKSLANKAPAMFISILKRKCETLGLPGVVEVDTYNLKASQYNHLSDTYEKKSLSERWNYMPISDGSDSSKTKRIQRDLYSAFLLQHTIPQPCSFDKEALRIDYPNFVTMHDAEIHRLESLPKTVTSMGVRRSHS

SEQ ID NO: 1750 - protein, 512 aa, unidentified
  REGION 1..512: note = Category: MG81 effectors
  REGION 1..512: note = Description: MG81-28 effector
  source 1..512: note = uncultivated organism sequence
MPTKQKEDSNRCVLTLPLLTEPWQEHIIEKRFKIIEHLKNQLIFIELRKLKNLQRTKAYKNLIKQIESVPKSERTALYKERNKMLKDAGFSQYTFMDDMAGKKSLMQKHFESHINVQIAHKAAIDVWSSFEKFLFGTGQIVHYQKRGTLSSVASKSPKTGMFYYSDENIFKWSGGGTKPKGGIILCLRVASVKTNYEKEMVANNEIKYYRVVRKWMKTKYKYYLQITFAGKPADKHREISTGRVGIDIGTQTIAIASDKSVKLLELADKVNKNHIKKCELQRKLDRSRRYTNPDNFNPDGTVRRGTKGHKLKWNKSKHYIEIAGKIRELERKNADIRKYQHTCLANDILAMGNQIYIEPMNYKGLQKKAKETQVDEKGRYKKKKRFGKSLANKAPAMFVTILKTKAEQHGGEVYEVDIMSYRASQCDHTTGEYTKHGLNDRWRILGNGDKVQRDLYSAFLIKNSNKTHDEIDLDKCSKTYDNFKKLHDKEIENIRNEVKLRERKNISSYGIA

SEQ ID NO: 1751 - protein, 512 aa, unidentified
  REGION 1..512: note = Category: MG81 effectors
  REGION 1..512: note = Description: MG81-29 effector
  source 1..512: note = uncultivated organism sequence
MPTKQKEDSNRCVLTLPLLTEPWQEHIIEKRFKIIEHLKNQLISIELRKLKNLQRTKAYKNLIKQIESVPKSERTVLYKERNKMLKDAGFSQYTFMDDMAGKKSLMQKHFESHINVQIAHKAAIDVWSSFEKFLFGTDQMIHYQKRGTLSSVASKSPKTGMFYYSDENIFKWSGGGTKPKGGIILCLRVASVKTNYEKEMVANNEIKYYRVVRKWMKTKYKYYLQITFAGKPADKHREISTGRVGIDIGTQTIAIASDKSVKLLELADKVNKNHIKKCELQRKLDRSRRYTNPDNFNPDGTVKRGTKGHKLKWNKSKHYLEIAGKIRELERKNADIQKYQHTCLANDILAMGNQIYIEPMNYKGLQKRAKETQVDEKGRYKKKKRFGKSLANKAPAMFVTILKTKVEQHGGEVYEVDIMSYRASQCDHTTGEYTKHGLNDRWRILGNGDKVQRDLYSAFLIKNSNKTHDEIDLDKCSKTYDSFKKLHDKEIENIRNEVKLRERRNISSYGIA

SEQ ID NO: 1752 - protein, 512 aa, unidentified
  REGION 1..512: note = Category: MG81 effectors
  REGION 1..512: note = Description: MG81-30 effector
  source 1..512: note = uncultivated organism sequence
MPTKQKEDSNRCVLTLPLLTEPWQEHIIEKRFKIIEHLKNQLISIELRKLKNLQRTKAYKNLIKQIESVPKSERTALYKERNKMLKDAGFSQYTFMDDMAGKKSLMQKHFESHINVQIAHKAAIDVWSSFEKFLFGTGQIVHYQKRGTLSSVASKSPKTGMFYYSDENIFKWSGGGTKPKGGIILCLRVASVKTNYEKEMVANNEIKYYRVVRKWMKTKYKYYLQITFAGKPADKHREISTGRVGIDIGTQTIAIASDKSVKLLELADKVNKNHIKKCELQRKLDRSRRYTNPDNFNPDGTVKRGTKGHKLKWNKSKHYLEIAGKIRELERKNADIRKYQHTCLANDILAMGNQIYIEPMNYKGLQKRVKETQVDEKGRYKKKKRFGKSLANKAPSMFVTILKTKAEQHGGEVYEVDIMSYRASQCDHTTGEYTKHGLNDRWRILGNGDKVQRDLYSAFLIKNSNKTHDEIDLDKCSKTYDNFKKLHDKEIENIRNEVKLRERRNISSYGIA

SEQ ID NO: 1753 - protein, 531 aa, unidentified
  REGION 1..531: note = Category: MG81 effectors
  REGION 1..531: note = Description: MG81-31 effector
  source 1..531: note = uncultivated organism sequence
MILLANNNNNNNNTDTCVLTLPLRVEKWQEDCLLKRFEAARRIYNSLLNFELKKLRQLERTAEYRQIQSVISSAYRSNTKDSLECKDAFKRREKLISANGISENGFKSDVKFFYKHFDGLIGSSVAVHCIAVQLWAAFDKYLSGSGKEIHFKRLGDISSLKGYSVKGKSGGCEIIFRGQYVEWTRKKKKLLLPLKIDPDNEYEREMLSRRVKYVRIIKKPGKNRLRWYAQLTLEGKPALKYSAGTGKPIHSVGKGNVGIDIGPQTVAYASDKEVALLELADRVTNIEHQKKKLQRKLDRSRRATNPDNYKPDGTIKRGVKLTRNKSKRYLKLQSKLAYIQHRQAEIRKLQHTCLANHMLTLGDRFFVEKMNWPGLAHRAKETSISEKTGRYKRKKRFGKSLANKAPAMFISILKRKCETLGLPGVVEVDTYSLKASQYNHLSDTYEKKSLSERWNYMPISDGSDSSKTKRIQRDLYSAFLLQHTIPQPCSFDKEALRIDYPNFVTMHDAEIHRLESLPKTVTSMGVRRSHS

SEQ ID NO: 1754 - protein, 512 aa, unidentified
  REGION 1..512: note = Category: MG81 effectors
  REGION 1..512: note = Description: MG81-32 effector
  source 1..512: note = uncultivated organism sequence
MPTKQKEGGNRCVLTLPLLTEPWQEHIIEKRFKIIEHLKNQLISIELRKLKKLQRTKAYKNLIKQIESVPKSERTVLYKERNKMLKDAGFSQYTFMDDMAGKKSLMQKHFESHINVQIAHKAAIDVWSSFEKFLFGTGQIVHYQKRGTLSSVASKSPKTGMFYYSDENIFKWSGGGTKPKGGIILCLRVASVKTNYEKEMVANNEIKYYRVVRKWMKTKYKYYLQITFAGKPADKHREISTGRVGIDIGTQTIAIASDKSVKLLELADKVNKNHIKKCELQRKLDRSRRYTNPDNFNPDGTVKRGTKGHKLKWNKSKHYLEVAGKIRELERKNADIRKYQHTCLANDILAMGNQIYIEPMNYKDLQKRAKETQVDEKGRYKKKKRFGKSLANKAPAMFVTILKTKAEQHGGEVYEVDIMSYRASQCDHTTGEYTKHGLNDRWRILGNGDKVQRDLYSAFLIKNSNKTHDEIDLDKCSKTYDSFKKLHDKEIENIRNEVILRKRRNISSYGIA

SEQ ID NO: 1755 - protein, 534 aa, unidentified
  REGION 1..534: note = Category: MG81 effectors
  REGION 1..534: note = Description: MG81-33 effector
  source 1..534: note = uncultivated organism sequence
MILLANNNNNNNNNNNTDTCVLTLPLRVEKWQEDCLLKRFEAARRIYNSLLNFELKKLRQLERTVEYRQIQSVISSAYRSNTKDSLECKDAFKRREKLISANGISENGFKSDVKFFYKHFDGLIGSSVAVHCIAVQLWAAFDKYLSGSGKEIHFKRLGDISSLKGYSVKGKSGGLEIIFRGQYVEWTRKKKKLLLPLKIDPDNEYEREMLSRRVKYVRIIKKPGKNRLRWYAQLTLEGKPALKYSAGTGKPIHSVGKGNVGIDIGPQTVAYASDKEVALLELADRVTNIEHQKKKLQRKLDRSRRATNPDNYKPDGTIKCGVKLTRNKSKRYLKLQSKLAYIQHRQAEIRKLQHTCLANHMLTLGDRFFVEKMNWPGLAHRAKETSISEKTGRYKRKKRFGKSLANKAPAMFISILKRKCETLGLPGVVEVDTYSLKASQYNHLSDTYEKKSLSERWNYMPISDGSDSSKTKRIQRDLYSAFLLQHTIPHPCSFDKEALRIDYPNFVIMHDAEIHRLEFLPKTVTSMGVRRSHS

SEQ ID NO: 1756 - protein, 528 aa, unidentified
  REGION 1..528: note = Category: MG81 effectors
  REGION 1..528: note = Description: MG81-34 effector
  source 1..528: note = uncultivated organism sequence
MILLANNNNNTDTCVLTLPLRVEKWQEDCLLKRFEAARRIYNSLLNFELKKLRQLERTVEYRQIQSVISSAYRSNTKDSLECKDAFKRRKKLTDENGISEYGFKSDVKFFYKHFDGLIGSNVAVHCIAVQLWAAFDKYLSGSGKEIHFKRLGDISSLKGYSVKGKSGGCEIIFRGQYVEWTRKKKKLLLPLKIDPDNEYEREMLSRRVKYVRIIKKPGKNRLRWYAQLTLEGKPALKYSAETGKPIHSVGKGNVGIDIGPQTVAYASDKEVALLELADRVTNIEHQKKKLQRKLDRSRRATNPDNYKPDGTIKRGVKLTRNKSKRYLKLQSKLAYIQHRQAEIRKLQHTCLANHMLTLGDRFFVEKMNWPGLAHRAKETSISEKTGRYKRKKRFGKSLANKAPAMFISILKRKCETLGLPGVVEVDTYNLKASQYNHLSDTCEKKSLSERWNYMPISDGSDSSKTKRIQRDLYSAFLLQHTIPQPCSFDKEALRIDYPNFVIMHDAEIHRLESLPKTITSMGVRRSHS

SEQ ID NO: 1757 - protein, 536 aa, unidentified
  REGION 1..536: note = Category: MG81 effectors
  REGION 1..536: note = Description: MG81-35 effector
  source 1..536: note = uncultivated organism sequence
MANNNNNNNNNNNNNNNNTDTCVLTLPLRVEKWQEDCLLKRFEAARRIYNSLLNFELKKLRQLERTVEYRQIQSVISSAYRSNTKDSLECKDAFKRRKKLTDENGISEYGFKSDVKFFYKHFDGLIGSNVAVHCIAVQLWAAFDKYLRGSGKEIHFKRLGDISSLKGYSVKGKSGGREIIFRGQYVEWIRKKKKLLLPLKIDPDNEYEREMLSRRVKYVRIIKKPGKNRLRWYAQLTLEGKPALKYSAGTGKPIHSVGKGNVGIDIGPQTVAYASDKEVALLELADRVTNIEHQKKKLQRKLDRSRRATNPDNYKPDGTIKRGVKLTRNKSKRYLKLQSKLAYIQHRQAEIRKLQHTCLANHMLTLGDRFFVEKMNWPGLAHRAKETSFSEKTGRYKRKKRFGKSLANKAPAMFISILKRKCETLGLPGVVEVDTYNLKASQYNHLSDTYEKKSLSERWNYMPISDGSDSSKTKRIQRDLYSAFLLQHTIPQPCSFDKEALRIDYPNFVTMHDAEIHRLESLPKTVTSMGVRRSHS

SEQ ID NO: 1758 - protein, 512 aa, unidentified
  REGION 1..512: note = Category: MG81 effectors
  REGION 1..512: note = Description: MG81-36 effector
  source 1..512: note = uncultivated organism sequence
MPTKQKEGGNRCVLTLPLLTEPWQEHIIEKRFKIIEHLKNQLISIELRKLKNLQRTKAYKNLIKQIESVPKSERTALYKERNKMLKDAGFSQYTFMDDMAGKKSLMQKHFESHINVQIAHKAAIDVWSSFEKFLFGTGQIVHYQKRGTLSSVASKSPKTGMFYYSDENIFKWSGGGTKPKGGIILCLRVASVKTNYEKEMVANNEIKYYRVVRKWMKTKYKYYLQITFAGKPADKHREISTGRVGIDIGTQTIAIASDKSVKLLEFADKVNKNHIKKCELQRKLDRSRQYTNPDNFNPDGTVKRGTKGHKLKWNKSKHYLEVAGKIRELERKNADIRKYQHTCLANDILAMGNQIYIEPMNYKGLQKRVKETQVDEKGRYKKKKRFGKSLANKAPAMFVTILKTKAEQHGGEVYEVDIMSYRASQCDHTTGEYTKHGLNDRWRILGNGDKVQRDLYSAFLIKNSNKTHDEIDLDKCSKTYDNFKKLHDKEIENIRNEVILRERRNISSYGIA

SEQ ID NO: 1759 - protein, 528 aa, unidentified
  REGION 1..528: note = Category: MG81 effectors
  REGION 1..528: note = Description: MG81-37 effector
  source 1..528: note = uncultivated organism sequence
MILLTKNNNNTDTCVLTLPLRVEKWQEDCLLKRFEAARRIYNSLLNFELKKLRQLERTVEYRQIQSVISSAYRSNTKDSLECKDAFKHREKLISANGISKNGFKSDVKFFYKHFDGLIGSSVAVHCIAVQLWAAFDKYLSGSGKEIHFKRLGDISSLKGYSVKGKSGGCEIIFRGQYVEWTRKKKKLLLPLKIDPDNEYEREMLSRRVKYVRIIKKPGKNRLRWYAQLTLEGKPALKYSAETGKPIHSVGKGNVGIDIGPQTVAYASDKEVALLELADRVTNIEHQKKKLQRKLDRSRRATNPDNYKPDGTIKRGVKLTRNKSKRYLKLQSKLAYIQHRQAEIRKLQHTCLANHMLTLGDRFFVEKMNWPGLAHRAKETSISEKTGRYKRKKRFGKSLANKAPAMFISILKRKCETLGLPGVVEVDTYSLKASQYNHLSDTCEKKSLSERWNYMPISDGSDSSKTKRIQRDLYSAFLLQHTIPQPCSFDKEALRIDYPNFVIMHDAEIHRLESLPKTITSMGVRRSHS

SEQ ID NO: 1760 - protein, 526 aa, unidentified
  REGION 1..526: note = Category: MG81 effectors
  REGION 1..526: note = Description: MG81-38 effector
  source 1..526: note = uncultivated organism sequence
MAKKNSNDTDTCVLTLPLRVEKWQEDCLLKRFEAARRIYNSLLNFELKKLRQLERTVEYRQIQSVISSAYRSNTKDSPECKDAFKRREKLISANGISEYGFKSDVKFFYKHFDGLIGSSVAVHCIAVQLWAAFDKYLRGSGKEIHFKRLGEISSLKGYSVKGKSGGLEIIFRGQYIEWTRKKKKLLLPLKIDPDNEYEREMLSRRVKYVRIIKKPGKNRLRWYAQLTLEGKPALKYSAETGKPIHSVGKGNVGIDIGPQTVAYASDKEVALLELADRVTNIEHQKKKLQRKLDRSRRATNPDNYKPDGTIKRGVKLTRNKSKRYLKLQSKLAYIQHRQAEIRKLQHTCLANHMLTLGDRFFVEKMNWPGLAHRAKETSISEKTGRYKRKKRFGKSLANKAPAMFISILKRKCETLGLPGVVEVDTYSLKASQYNHLSDTYEKKSLSERWNYMPISDGSDSSKTKRIQRDLYSAFLLQHTIPQPCSFDKEALRIDYPNFVIMHDAEIHRLESLPKTITSMGVRRSHS

SEQ ID NO: 1761 - protein, 530 aa, unidentified
  REGION 1..530: note = Category: MG81 effectors
  REGION 1..530: note = Description: MG81-39 effector
  source 1..530: note = uncultivated organism sequence
MILLAKNNNNNNTDTCVLTLPLRVEKWQEDCLLKRFEAARRIYNSLLNFELKKLRQLERTVEYRQIQSVISSAYRSNTKDSPECKDAFKRREKLISANGISENGFKSDVKFFYKHFDGLIGSNVAVHCIAVQLWAAFDKYLSGSGKEIHFKRLGDISSLKGYSVKGKSGGCEIIFRGQYVEWTRKKKKLLLPLKIDPDNEYEREMLSRRVKYVRIIKKPGKNRLRWYAQLTLEGKPALKYSAETGKPIHSVGKGNVGIDIGPQTVAYASDKEVALLELADRVTNIEHQKKKLQRKLDRSRRATNPDNYKPDGTIKCGVKLTRNKSKRYLKLQSKLAYIQHRQAEIRKLQHTCLANHMLTLGDRFFVEKMNWPGLAHRAKETSISEKTGRYKRKKRFGKSLTNKAPAMFISILKRKCETLGLPGVVEVDTYSLKASQYNHLSDTYEKKSLSERWNYMPISDGSDSSKTKRIQRDLYSAFLLQHTIPHPCSFDKKALRIDYPNFVTMHDAEIHRLESLPKTITSMGVRRSHS

SEQ ID NO: 1762 - protein, 526 aa, unidentified
  REGION 1..526: note = Category: MG81 effectors
  REGION 1..526: note = Description: MG81-40 effector
  source 1..526: note = uncultivated organism sequence
MAKKNNNDTDTCVLTLPLRVEKWQEDCLLKRFEAARRIYNSLLNFELKKLRQLERTVEYRQIQSVISSAYRSNTKDSLECKDAFKRREKLISANGISENGFKSDVKFFYKHFDGLIGSSVAVHCIAVQLWAAFDKYLSGSGKEIHFKRLGDISSLKGYSVKGKSGGCEIIFRGQYVEWTRKKKKLLLPLKIDPDNEYEREMLSRRVKYVRIIKKPGKNRLRWYAQLTLEGKPALKYSAETGKPIHSVGKGNVGIDIGPQTVAYASDKEVALLELADRVTNIEHQKKKLQRKLDRSRRATNPDNYKPDGTIKRGVKLTRNKSKRYLKLQSKLAYIQHRQAEIRKLQHTCLANHMLTLGDRFFVEKMNWPGLAHRAKETSISEKTGRYKRKKRFGKSLANKAPAMFISILKRKCETLGLPGVVEVDTFRLRASQYNHLSDTYEKKSLSERWNYMPISDGSDSSKTKRIQRDLYSAFLLQHTIPQPCSFDKKALRIDYPNFVTMHDAEIHRLESLPKTITSMGVRRSHS

SEQ ID NO: 1763 - protein, 524 aa, unidentified
  REGION 1..524: note = Category: MG81 effectors
  REGION 1..524: note = Description: MG81-41 effector
  source 1..524: note = uncultivated organism sequence
MAKNNNTDTCVLTLPLRVEKWQEDCLLKRFEAARRIYNSLLNFELKKLRQLERTVEYRQIQSVISSAYRSNTKDSPECKDAFKRREKLISANGISEYGFKSDVKFFYKHFDGLIGSSVAVHCIAVQLWAAFDKYLRGSGKEIHFKRLGEISSLKGYSVKGKSGGLEIIFRGQYIEWTRKKKKLLLPLKIDPDNEYEREMLSRRVKYVRIIKKPGKNRLRWYAQLTLEGKPALKYSAETGKPIHSVGKGNVGIDIGPQTVAYASDKEVALLELADRVTNIEHQKKKLQRKLDRSRRATNPDNYKPDGTIKRGVKLTRNKSKRYLKLQSKLAYIQHRQAEIRKLQHTCLANHMLTLGDRFFVEKMNWPGLAHRAKETSISEKTGRYKRKKRFGKSLANKAPAMFISILKRKCETLGLPGVVEVDTYNLKASQYNHLSDTYEKKSLSERWNYMPISDGSDSSKTKRIQRDLYSAFLLQHTIPQPCSFDKEALRIDYPNFVTMHDAEIHRLESLPKTVTSMGVRRSHS

SEQ ID NO: 1764 - protein, 341 aa, unidentified
  REGION 1..341: note = Category: MG81 effectors
  REGION 1..341: note = Description: MG81-42 effector
  source 1..341: note = uncultivated organism sequence
MLPLKIDPDNEYEREMLSRRVKYVRIIKKPGKNRLRWYAQLTLEGKPALKYSAETGKPIHSVGKGNVGIDIGPQTVAYASDKEVALLELADRVTNIEHQKKKLQRKLDRSRRATNPDNYKPDGTIKRGVKLTRNKSKRYLKLQSKLAYIQHRQAEIRKLQHTCLANHMLTLGDRFFVEKMNWPGLAHRAKETSISEKTGRYKRKKRFGKSLANKAPAMFISILKRKCETLGLPGVVEVDTYNLKASQYNHLSDTYEKKSLSERWNYMPISDGSDSSKTKRIQRDLYSAFLLQHTIPQPCSFDKEALRIDYPNFVTMHDAEIHRLESLPKTVTSMGVRRSHS

SEQ ID NO: 1765 - protein, 534 aa, unidentified
  REGION 1..534: note = Category: MG81 effectors
  REGION 1..534: note = Description: MG81-43 effector
  source 1..534: note = uncultivated organism sequence
MILLANNNNNNNNNNNTDTCVLTLPLRVEKWQEDCLLKRFEAARRIYNSLLNFELKKLRQLERTVEYRQIQSVISSAYRSNTKDSPECKDAFKRREKLISANGISEYGFKSDVKFFYKHFDGLIGSNVAVHCIAVQLWAAFDKYLRGSGKEIHFKRLGDISSLKGYSVKGKSGGCEIIFRGQYIEWTRKKKKLLLPLKIDPDNEYEREMLSRRVKYVRIIKKPGKNRLRWYAQLTLEGKPALKYSAETGKPIHSVGKGNVGIDIGPQTVAYASDKEVALLELADRVTNIEHQKKKLQRKLDRSRRATNPDNYKPDGTIKRGVKLTRNKSKRYLKLQSKLAYIQHRQAEIRKLQHTCLANHMLTLGDRFFVEKMNWPGLAHRAKETSISEKTGRYKRKKRFGKSLANKAPAMFISILKRKCETLGLPGVVEVDTYSLKASQYNHLSDTYEKKSLSERWNYMPISDGSDSSKTKRIQRDLYSAFLLQHTIPQPCSFDKKALRIDYPNFVTMHDAEIHRLESLPKTITSMGVRRSHS

SEQ ID NO: 1766 - protein, 511 aa, unidentified
  REGION 1..511: note = Category: MG81 effectors
  REGION 1..511: note = Description: MG81-44 effector
  source 1..511: note = uncultivated organism sequence
MKKSNTDTCCLTLPLKLEKWQEDRLAKRFEIARQIYNTMVHAELKKLRNIENSQPYRQIQKQIEALNWKNQNDKARLKSLYNDRNKLLNTIGFSEYGFKADIKYYYKHFNDNIGSSVAVHGIAPQVWAAFEKMLFHKEGKKVHYKKKDDIHSLHGYSVTGKSGGVEIIFRKTYIEWKGLKLPLKRSPDNAYETEMLGRRVKYVRLLRKPGKRKDCWYAQLSLEGKPAIKRDPESGKRRHSIGRGAVGLDIGPQTLAYSACGAADLVELADQVQNIEQMKRRLQRKLDRSRRATNPDNYADNGTIRRGVKLTHNKSNRYRRTQRELRYLQHCQAEIRKRQHIELANHLLALGDCFYVEDMAWPSLTHRAKETAISEKTGRIKRKKRFGKSVANKAPATLIGILEQKCNSLGLPGVMKVPTSLRASQYNHQSGEYTSKPLSQRWNNMPDGERIQRDLYSAFLLQHYDPKAGNFDSALLQQDYPQFVQYHHRAIQRLSTVPKTLSSMGIQRSLR

SEQ ID NO: 1767 - protein, 512 aa, unidentified
  REGION 1..512: note = Category: MG81 effectors
  REGION 1..512: note = Description: MG81-45 effector
  source 1..512: note = uncultivated organism sequence
MPTKQKEDSNRCVLTLPLLTEPWQEHIIEKRFKIIEHLKNQLISIELRKFKNLQRTKAYKNLIKQIESVPKSERTVLYKERNKMLKDAGFSQYTFMDDMAGKKSLMQKHFESHINVQIAHKAAIDVWSSFEKFLFGSGQMIHYQKRGTLSSVASKSPKTGMFYYSDENIFKWSGGGTKPKGGIILCLRVASVKTNYEKEMVANNEIKYYRVVRKWMKTKYKYYLQITFAGKPADKHREISTGRVGIDIGTQTIAIASDKSVKLLELADKVNKNHIKKCELQRKLDRSRRYTNPDNFNPDGTVKRGTKGHKLKWNKSKHYLEIAGKIRELERKNADIRKYQHTCLANDILAMGNQIYIEPMNYKGLQKRAKETQVDEKGRYKKKKRFGKSLANKAPAMFVTILKTKVEQHGGEVYEVDIMLYRASQCDHTTGEYTKHGLNDRWRILGNGDKVQRDLYSAFLIKNSNKTHDEIDLDKCSKTYDNFKKLHDKEIENIRNEVKLRERKNISSYGIA

SEQ ID NO: 1768 - protein, 530 aa, unidentified
  REGION 1..530: note = Category: MG81 effectors
  REGION 1..530: note = Description: MG81-46 effector
  source 1..530: note = uncultivated organism sequence
MILLAKNNNNNNTDTCVLTLPLRVEKWQEDCLLKRFEAARRIYNSLLNFELKKLRQLERTVEYRQIQSVISSAYRSNTKDSPECKDAFKRREKLISANGISEYGFKSDVKFFYKHFDGLIGSSVAVHCIAVQLWAAFDKYLSGSGKEIHFKRLGDISSLKGYSVKGKSGGREIIFRGQYIEWTRKKKKLLLPLKIDPDNEYEREMLSRRVKYVRIIKKPGKNRLRWYAQLTLEGKPALKYSAGTGKPIHSVGKGNVGIDIGPQTVAYASDKEVALLELADRVTNIEHQKKKLQRKLDRSRRATNPDNYKPDGTIKRGVKLTRNKSKRYLKLQSKLAYIQHRQAEIRKLQHTCLANHMLTLGDRFFVEKMNWPGLAHRAKETSISEKTGRYKRKKRFGKSLANKAPAMFISILKRKCETLGLPGVVEVDTYSLKASQYNHLSDTYEKKSLSERWNYMPISDGSDSSKTKRIQRDLYSAFLLQHTIPQPCSFDKEALRIDYPNFVTMHDAEIHRLESLPKTVTSMGVRRSHS

SEQ ID NO: 1769 - protein, 1338 aa, unidentified
  REGION 1..1338: note = Category: MG81 effectors
  REGION 1..1338: note = Description: MG81-47 effector
  source 1..1338: note = uncultivated organism sequence
MKFSKYEHKSAAVVLKNSAAEKRVSDNVEGILFPLQKETLDNYVEKRIDKVQEKYAVLVNAKISKKDKEEKTKEEAIKYFNEFMDYLFVKWHDREQGVSAKTAKNKEQLKKLVEKLVKFLRNKGRDNLYIGKRKTKIKDINLELSDESVHELVRTKIRGSLRKNFCYKVSGKTAVCYLPDVIGKLMKIVCVESDFVSGMRRIPKEELEKTFLIIATEYNKKIKEDNVVKSIQNQNVRVQVFYEEGEARLELANARHRKKKCIFDLQRRFALGDQNERKKILCELAKLIILFTAGTDVYHKIKNRDIPLWNFNFLDDVLTEETKIFHQECVDIINNRDQIQDKLKKQDEESIEKEKNIRKVNNFNKEIRKGIYQKIRSRYQEYKKLKGNELPDESEFWIEEIERDIEGMFLKDKKRWIRQEELDVKRMCGRLWEKRIEYLRSKYVDIGKGVYHFAMPDLHNLIEKKEIKIGEVQPEFQKGITSFDYERIKAEENLERSFIIYITFAVNNFARAVYPPTFYKKNGNEDILQIKDPETIRESRHGDAGRRIMQFFGGVSQWKEVLGISENIPSDYTEKLIVDIQKAMNQIRNVSFHYASSFPKRVYEEDSPLIKIFNKEREGLSKLYCEKIFSNNVPKFYKINDITKLMDHLYEDTKVDLEAQIPSFKKVLSPGKFIEQINDFVDKEAYENLNEKDIFHHALYYTLKQIYYNCFIKSENLKEKFIEALNEMKKNPQDDTEKWALNSLCKRIDEYEKNISFGNLCQRIMTDYALQNSEMKVQIDKDNSKTDKKYEHFIMLLYKGIRKIFISYYNGEWEGSGEKFDYDFLKKPEFNAEDKEISKEEFCAQWEKELYSDLASEKEGWIISWFIVAHFMTPTHVNHLRGEIKGYFGYVNGIENRRYNIMKKSRPIDEEIKKRYEKVLKVLNLASEYCGLVSAKWEDYYSDENDFAEDIRKYVQYENQEPDKSQQEQLKQFCSKTAADSPSGYINIYEAGGVPIVNRNIIHAKMYGTEKLLSKCFTDDRITEEEIRDFYKKRKELEELFRKGICKEKEEEESKRKYQQKKNRIELQDIQKYSDILNDLMSQLISWCYLRERDKMYFQLGLHYIRLYHDKEKKIVEESSKLRVLKRYDEDHAAEIQIISDGALLYQLAAIYTYELPIFEIQNRGMAKIVSSTQNGSMISASERVFRKKYLGENKSKNSLLEVGMELFENKKKEKFIREYRNYLDHFKYYARNDMSMMELYNKMFFLFFSNDIKLRKSVTVVFRNILARHFVLSKLVFCKESSIEGGKRFVLKDNLKSKTTTHKPEKNIEFEVDYYDEHFLKRLQKILEYKTKIMDEK

SEQ ID NO: 1770 - protein, 538 aa, unidentified
  REGION 1..538: note = Category: MG81 effectors
  REGION 1..538: note = Description: MG81-48 effector
  source 1..538: note = uncultivated organism sequence
MGLEFKKYDVVMVDFPERKCGSIQSGLRPAIIIQNDIGNQYSPTLLVIPLTTKIKSLNQPTHTLIKKAIGNGLDQDSMLLAEQTTAICKEHAKKIGEIRNETVKKQILTCFLNEANKLLKDAGISQFDFIKDISSLQKHFAPHIAQKVGAAAARSHVWSAFDKVVFGKGQRIHFHKKGDLKSITSGYFGISMTVKNGYFIWSGGTKDEKDRKVNPITISVKIKQPETYYEKEMLQKQIKYVTIVRKWIKNRYKYYLQFMLVGNPVVKPRVIANGKRVGIDIGPSSAAIVSEKEVKLVELADKVQKNHDKKTQLQRSMDRSRRAMNPQNFNKNGTIKRGIKLIWNESNHYKEMRGQVRELERKNADIRKYQHTCLANYVMSLGTEVYVEQMNFKGLQKRAKETKYDENGRPKRKKRFGKSIANRAPAMFITILNNKLFGIAGEELHKVNTFTFKASQYDHTNDTYKKKLLKDRWAELSNGDKIQRDLYSAFLIMNSDAEMQQADLRKCEETYKRFKEQHDGLIVKMKESNHIRLSSFGF

SEQ ID NO: 1771 - protein, 533 aa, unidentified
  REGION 1..533: note = Category: MG81 effectors
  REGION 1..533: note = Description: MG81-49 effector
  source 1..533: note = uncultivated organism sequence
MANNNNNNNNNNNNNTDTCVLTLPLRVEKWQEDCLLKRFEAARRIYNSLLNFELKKLRQLERTVEYRQIQSVISSAYRSNTKDSLECKDAFKRRKKLTDENGISEYGFKSDVKFFYKHFDGLIGSNVAVHCIAVQLWAAFDKYLRGSGKEIHFKRLGDISSLKGYSVKGKSGGCEIIFRGQYVEWTRKKKKLLLPLKIDPDNEYEREMLSRRVKYVRIIKKPGKNRLRWYAQLTLEGKPALKYSAGTGKPIHSVGKGNVGIDIGPQTVAYASDKEVALLELADRVTNIEHQKKKLQRKLDRSRRATNPDNYKPDGTIKRGVKLTRNKSKRYLKLQSKLAYIQHRQAEIRKLQHTCLANHMLTLGDRFFVEKMNWPGLAHRAKETSISEKTGRYKRKKRFGKSLANKAPAMFISILKRKCETLGLPGVVEVDTYNLKASQYNHLSDTYEKKSLSERWNYMPISDGSDSSKTKRIQRDLYSAFLLQHTIPQPCSFDKEALRIDYPNFVTMHDAEIHRLESLPKTVTSMGVRRSHS

SEQ ID NO: 1772 - protein, 561 aa, unidentified
  REGION 1..561: note = Category: MG81 effectors
  REGION 1..561: note = Description: MG81-50 effector
  source 1..561: note = uncultivated organism sequence
MNISRSHRIRLFPTKEQERFLQDCAFVARTAWNFGLSFLIESNRRVIADWNALSDAERLARDPALKPKKESKRKKKKTEVSDDKKKKQSKPKVEWASYTDDDRLKRAPTGWDSAPASAAWTQVKKTSASGQLRGAVIANAVPAMVGFNAFIDLNKAWNKYFKECGSKPCSRRKDDKNCWCKDFPAWMGCGHPRFKNRSSGKSFLLPGSDKSGCNAIFGVDGKHFVFTGNKYHQRITMAEELRFQGRVASARVFEDNRHWYASIQVMDITVPDPAAHAGPSVGVDLGVASTATLSTGEKIDNLHAARKNEPRIAKLNQAISLKSIWLPCPACAGEPDKKKECKRCSGAGQVQDRRAVTCEVCKGTGKDLEDESKRCRRCRGCGRQKSQRMIDLEAKITKLQQHAANQRNDHMHKATTRIVQTYSFIGLEDINFNEMKTQNAEKMTGEGKRKRGFQRSLTDACPGEFRRQLEYKAPAYGGRSVRIDKWSASSKICSACGERVDDLPMSVRTWTCPVCGVSHDRDINAAVNILRKALDEAKTTGEQSAVVKKPRCAKKELHDAR

SEQ ID NO: 1773 - protein, 512 aa, unidentified
  REGION 1..512: note = Category: MG81 effectors
  REGION 1..512: note = Description: MG81-51 effector
  source 1..512: note = uncultivated organism sequence
MPTKQKEDSNRCVLTLPLLTEPWQEHIIEKRFKIIEHLKNQLISIELRKLKNLQRTKAYKNLMKRIESVPKSERTALYKERNKMLKDAGFSQYTFMDDMAGKKSLMQKHFESHINVQIAHKAAIDVWSSFEKFLFGTGQIVHYQKRGTLSSVASKSPKTGMFYYPDENIFKWSGGGTKPKGGIILCLRVASVKTNYEKEMIANNEIKYYRVVRKWMKTKYKYYLQITFAGKPADKHREISTGRVGIDIGTQTIAIASDKSVKLLELADKVNKNHIKKCELQRKLDRSRRYTNPDNFNPDGTVKRGTKGHKLKWNKSKHYLEVAGKIRELERKNADIRKYQHTCLANDILAMGNQIYIEPMNYKGLQKRAKETQVDEKGRYKKKKRFGKSLANKAPAMFVTILKTKAEQHGGEVYEVDIMSYRASQCDHTTGEYTKHGLNDRWRILGNGDKVQRDLYSAFLIKNSNKTHDEIDLDKCSKTYDSFKKLHDKEIENIRNEVILRKRRNISSYGIA

SEQ ID NO: 1774 - protein, 512 aa, unidentified
  REGION 1..512: note = Category: MG81 effectors
  REGION 1..512: note = Description: MG81-52 effector
  source 1..512: note = uncultivated organism sequence
MPTKQKEGGNRCVLTLPLLTEPWQEHIIEKRFKIIEHLKNQLISIELRKLKNLQRTKAYKNLIKQIESVPKSERTVLYKKRNKMLKDAGFSQYTFMDDMAGKKSLMQKHFESHINVQIAHKAAIDVWSSFEKFLFGSGQMIHYQKRGTLSSVASKSPKTGMFYYSDENIFKWSGGGTKPKGGIILCLRVAPVKTNYEKEMVANNEIKYYRVVRKWMKTKYKYYLQITFAGKPADKHHEVSTDRVGIDIGTQTIAIASDKSVKLLELADKVNKNHIKKCELQRKLDRSRRYTNPDNFNPDGTVKRGTKGHKLKWNKSKHYIEIAGKIRELERKNADIRKYQHTCLANDILAMGNQIYIEPMNYKGLQKRVKETQVDEKGRYKKKKRFGKSLANKAPAMFVTILKTKAEQHGGEVYEVDIMSYRASQCDHTTGEYTKHGLNDRWRILGNGDKVQRDLYSAFLIKNSNKTHDEIDLDKCSKTYDNFKKLHDKEIENIRNEVILRERRNISSYGIA

SEQ ID NO: 1775 - protein, 512 aa, unidentified
  REGION 1..512: note = Category: MG81 effectors
  REGION 1..512: note = Description: MG81-53 effector
  source 1..512: note = uncultivated organism sequence
MPTKQKEDSNRCVLTLPLLTEPWQEHIIEKRFKIIEHLKNQLISIELRKLKNLQRTKAYKNLMKRIESVPKSERTALYKERNKMLEGKGFSQYTFMDDMAGKKSLMQKHFESHINVQIAHKAAIDVWSSFEKFLFGSGQMIHYQKRGTLSSVASKSPKTGMFYYPDENIFKWSGGGTKPKGGIILCLRVASVKTNYEKEMVANNEIKYYRVVRKWMKTKYKYYLQITFAGKPADKHREISTGRVGIDIGTQTIAIASDKSVKLLELADKVNKNYIKKCELQRKLDRSRRYTNPDNFNPDGTVKRGTKGHKLKWNKSKHYLEIAGKIRELERKNADIRKYQHTCLANDILAMGNQIYIEPMNYKGLQKRAKETQVDEKGRYKKKKRFGKSLANKAPAMFVTILKTKAEQHGGEVYEVDIMSYRASQCDHTTGEYTKHGLNDRWRILGNGDKVQRDLYSAFLIKNSNKTHDEIDLDKCSKTYDSFKKLHDKEIENIRNEVKLRERKNISSYGIA

SEQ ID NO: 1776 - protein, 512 aa, unidentified
  REGION 1..512: note = Category: MG81 effectors
  REGION 1..512: note = Description: MG81-54 effector
  source 1..512: note = uncultivated organism sequence
MPTKQKEGGNRCVLTLPLLTEPWQEHIIEKRFKIIEHLKNQLISIELRKLKNLQRTKAYKNLIKQIESVPKSERTALYKERNKMLKDAGFSQYTFMDDMAGKKSLMQKHFESHINVQIAHKAAIDVWSSFEKFLFGTGQIVHYQKRGTLSSVASKSPKTGMFYYSDENIFKWSGGGTKPKGGIILCLRVASVKTNYEKEMVANNEIKYYRVVRKWMKTKYKYYLQITFAGKPADKHREISTGRVGIDIGTQTIAIASDKTVKLLELADKVNKNHIKKCELQRKLDRSRRYTNPDNFNPDGTVKRGTKGHKLKWNKSKHYIEIAGKIRELERKNADIRKYQHTCLANDILAMGNQIYIEPMNYKGLQKRAKETQVDEKGRYKKKKRFGKSLANKAPAMFVTILKTKAEQHGGEVYEVDIMSYRASQCDHTTGEYTKHGLNDRWRILGNGDKVQRDLYSAFLIKNSNKTHDEIDLDKCSKTYDSFKKLHDKEIENIRNEVKLRERRNISSYGIA

SEQ ID NO: 1777 - protein, 512 aa, unidentified
  REGION 1..512: note = Category: MG81 effectors
  REGION 1..512: note = Description: MG81-55 effector
  source 1..512: note = uncultivated organism sequence
MPTKQKEGGNRCVLTLPLLTEPWQEHIIEKRFKIIEHLKNQLISIELRKLKKLQRTKAYKNLIKQIESVPKSERTALYKERNKMLKDAGFSQYTFMDDMAGKKSLMQKHFESHINVQIAHKAAIDVWSSFEKFLFGTGQIVHYQKRGTLSSVASKSPKTGMFYYSDENIFKWSGGGTKPKGGIILCLRVASVKTNYEKEMVANNEIKYYRVVRKWMKTKYKYYLQITFAGKPADKHREISTGRVGIDIGTQTIAIASDKSVKLLELADKVNKNHIKKCELQRKLDRSRRYTNPDNFNPDGTVKRGTKGHKLKWNKSKHYIEIAGKIRELERKNADIRKYQHTCLANDILAMGNQIYIEPMNYKGLQKRAKETQVDEKGRYKKKKRFGKSLANKAPAMFVTILKTKAEQHGGEVYEVDIMSYRASQCDHTTGEYTKHGLNDRWRILGNGDKVQRDLYSAFLIKNSNKTHDEIDLDKCSKTYDNFKKLHDKEIENIRNEVILRERKNISSYGIA

SEQ ID NO: 1778 - protein, 512 aa, unidentified
  REGION 1..512: note = Category: MG81 effectors
  REGION 1..512: note = Description: MG81-56 effector
  source 1..512: note = uncultivated organism sequence
MKKSSTDTCCLTLPLKLEKWQEDRLAKRFEIARQLYNTLVHAELKRLVQIKRTAEYLENEQKIRALDRNNPADRAKLQELYKEQRKSLKTAGFTDYSFTTDMGKYYKHFRDNIGSSVAVHGIAPQVWAAFDKVLFKKGGKKVHYKRPGEVNSVQGYSRTGKSGGTEIMFRGPYIEWKGLKLPLKLSPDNAYETDMLQRRVKLVRLVRRPGKRRDRWYAQLVLEAKPAIKADPVTGKAVHPIGSGPVGLDIGPQTLAYSAAGAAGLVELADRVQNIEQEKRRLQRKMDRSRRAANPDNYAEDGTIRRGVKLTHNKSKRYRRSQQELKYLQHRQAEIRKLQHIQLANHLLSLGDHFYVEKMEWSSLTHRAKETVISEKTGKPRSKRRFGKSIANKAPAMLIEILRQKCKSLGLSDVVEINPADIKASQYNHLTGKYVKKSLSRRWNDMQDGEHLQRDLYSAFLLQHYDSCSKTLDLDSLARDYPAFVQYHHREIERLHALPKTPSSMGIRRSIA

SEQ ID NO: 1779 - protein, 512 aa, unidentified
  REGION 1..512: note = Category: MG81 effectors
  REGION 1..512: note = Description: MG81-57 effector
  source 1..512: note = uncultivated organism sequence
MPAKQKEGSNRCVLTLPLLTEPWQEHIIEKRFKIIEHLKNQLISIELRKLKNLQRTKAYKNLMKRIESVPKSERTALYKERNKMLKDAGFSQYTFMDDMAGKKSLMQKHFESHINVQIAHKAAIDVWSSFEKFLFGTGQIVHYQKRGTLSSVASKSPKTGMFYYSDENIFKWSGGGTKPKGGIILCLRVAPVKTNYEKEMVANNEIKYYRVVRKWMKTKYKYYLQITFAGKPADKHHEVSTGRVGIDIGTQTIAIASDKSVKLLELADKVNKNHIKKCELQRKLDRSRRYTNPDNFNPDGTVKRGTKGHKLKWNKSKHYIEIAGKIRELERKNADIRKYQHTCLANDILAMGNQIYIEPMNYKGLQKRAKETQVDEKGRYKKKKRFGKSLANKAPAMFVTILKTKAEQHGGEVYEVDIMSYRASQCDHTTGEYTKHGLNDRWRILGNGDKVQRDLYSAFLIKNSNKTHDEIDLDKCSKTYDNFKKLHDKEIENIRNEVKLRERRNISSYGIA

SEQ ID NO: 1780 - protein, 512 aa, unidentified
  REGION 1..512: note = Category: MG81 effectors
  REGION 1..512: note = Description: MG81-58 effector
  source 1..512: note = uncultivated organism sequence
MPTKQKEDSNRCVLTLPLLTEPWQEHIIEKRFKIIEHLKNQLISIELRKLKKLQRTKAYKNLIKQIESVPKSERTALYKERNKMLKDAGFSQYTFMDDMAGKKSLMQKHFESHINVQIAHKAAIDVWSSFEKFLFGTGQIVHYQKRGTLSSVASKSPKTGMFYYPDENIFKWSGGGTKPKGGIILCLRVASVKTNYEKEMVANNEIKYYRVVRKWMKTKYKYYLQITFAGKPADKHREISTGRVGIDIGTQTIAIASDKSVKLLELADKVNKNHIKKCELQRKLDRSRRYTNPDNFNPDGTVKRGTKGHKLKWNKSKHYLEIAGKIRELERKNADIRKYQHTCLANDILAMGNQIYIEPMNYKGLQKRAKETQVDEKGRYKKKKRFGKSLANKAPAMFVTILKTKAEQHGGEVYEVDIMSYRASQCDHTTGEYTKHGLNDRWRILGNGDKVQRDLYSAFLIKNSNKTHDEIDLDKCSKTYDSFKKLHDKEIENIRNEVILRKRRNISSYGIA

SEQ ID NO: 1781 - protein, 512 aa, unidentified
  REGION 1..512: note = Category: MG81 effectors
  REGION 1..512: note = Description: MG81-59 effector
  source 1..512: note = uncultivated organism sequence
MPTKQKEDSNRCVLTLPLLTEPWQEHIIEKRFKIIEHLKNQLISIELKKLKNLQRTKAYKNLIKQIESVPKSERTALYKERNKMLKDAGFSQYTFMDDMAGKKSLMQKHFESHINVQIAHKAAIDVWSSFEKFLFGTGQMIHYQKRGTLSSVASKSPKTGMFYYSDENIFKWSGGGTKPKGGIILCLRVASVKTNYEKEMVANNEIKYYRVVRKWMKTKYKYYLQITFAGKPADKHREISTGRVGIDIGTQTIAIASDKSVKLLELADEVNKNHIKKCELQRKLDRSRRYTNPDNFNPDGTVKRGTKGYKLKWNKSKHYIEIAGKIRELERKNADIRKYQHTCLANDILAMGNQIYIEPMNYKGLQKRAKETQVDEKGRYKKKKRFGKSLANKAPAMFVTILKTKAEQHGGEVYEVDIMSYRASQCDHTTGEYTKHGLNDRWRILGNGDKVQRDLYSAFLIKNSNKTHDEIDLDKCSKTYDNFKKLHDKEIENIRNEVILRKRRNISSYGIA

SEQ ID NO: 1782 - protein, 185 aa, unidentified
  REGION 1..185: note = Category: MG81 effectors
  REGION 1..185: note = Description: MG81-60 effector
  source 1..185: note = uncultivated organism sequence
MKNKYKRTGTTVSIQQHNELANRLLSFGSEHYIEEMRFRALAKQAKETKFNSKGRPVRKKRFGKSIFNKAPALFAKTIKRKVLNAGGSFQRVDTFSVKASQFNHLTETYTKKSLGKRWNTMPDGTKVQRDLYSAFLIQNVDDSLKQVDVERCNQSYDSFLALHDREIRRLSYLLTPNSMGAQHSA

SEQ ID NO: 1783 - protein, 512 aa, unidentified
  REGION 1..512: note = Category: MG81 effectors
  REGION 1..512: note = Description: MG81-61 effector
  source 1..512: note = uncultivated organism sequence
MPTKQKEDSNRCVLTLPLLTEPWQEHIIEKRFKIIEHLKNQLISIELRKLKNLQRTKAYKNLIKQIESVPKSERTVLYKERNKMLKDAGFSQYTFMDDMAGKKSLMQKHFESHINVQIAHKAAIDVWSSFEKFLFGTGQMIHYQKRGTLSSVASKSPKTGMFYYSDENIFKWSGGGTKPKGGIILCLRVASVKTNYEKEMVANNEIKYYRVVRKWMKTKYKYYLQITFAGKPADKHREISTGRVGIDIGTQTIAIASDKSVKLLELADKVNKNHIKKCELQRKLDRSRRYTNPDNFNPDGTVKRGTKGHKLKWNKSKHYLEIAGKIRELERKNADIRKYQHTCLANDILAMGNQIYIEPMNYKGLQKRAKETQVDEKGRYKKKKRFGKSLANKAPAMFVTILKTKVEQHGGEVYEVDIMSYRASQCDHTTGEYTKHGLNDRWRILGNGDKVQRDLYSAFLIKNSNKTHDEIDLDKCSKTYDSFKKLHDKEIENIRNEVKLRERRNISSYGIA

SEQ ID NO: 1784 - protein, 511 aa, unidentified
  REGION 1..511: note = Category: MG81 effectors
  REGION 1..511: note = Description: MG81-62 effector
  source 1..511: note = uncultivated organism sequence
MAKCSTDTCCLTLPLRLEKWQEDRLAKRFEIARRIYNTMVRAELKKLRAIEQSEPYKANQEKIQALDWKTQADKQALKALYKERDKLLRDGGFSERGFKSDIKNYYKHFNNNIGSNVAAHGIAPQVWAAFEKMLFKKEGKKVHFKKKGDIRSLRGYSVTGKSGGVEIIFRETYIEWKGLKLPLKLSPDNIYETQMLSYRVKYVRLLRKPGKRKDRWYAQLSLEGKPVIKYNPKTGEVRHPIGKGAVGLDIGPQTLAYSAATGADLVELANQVQNVEQEKRRLQRKLDRSRRATNPGNYADDGTIRRGIALTHNKSKRYLRTQQELKYLQHQQAEIRKRQHTELANHLLSLGDCFYVEKMVWTSLTHRAKETEISEKTGKIKRKKRFGKSVANKAPATLIGILQLKSAALGIPGVIEVPTSVKASQYNHQSGTYTPKPLSQRWNNMPDGERIQRDLYSAFLLQHYDPQTNTFDANSLHQDYPQFVQYHHDAVLRLYAMPKTPSSMGIKRSLR

SEQ ID NO: 1785 - protein, 511 aa, unidentified
  REGION 1..511: note = Category: MG81 effectors
  REGION 1..511: note = Description: MG81-63 effector
  source 1..511: note = uncultivated organism sequence
MGKSSTDTCCLTLPLKLEKWQEDRLAKRFEIARQIYNTMVRAELKRLRQVEQSPQYRSNKKAIQALDWKNTADKPKLKTLYRERDKLLKGGGFTEYGFKSDIKNFYKHFAENIGSSVAVHGIAPQVWAAFERVLFKKEGKKVHFKKTGDIRSLRGYSVTGKSGGVEIIFRGSYIEWKGLDLPLKLSPDNAYETEMLSYRVKYVRILRKPGKTRDRWYAQLSLEGKPAIKRNPASGNPVHPVGQGAVGLDIGPQTLAYAAEKEANLVELADRVQNIEREKHLLQRKMDRSRRAANPDNYAENGTIRRGVKLTHNKSKRYLRLQRELCYLQHCQAETRKRQHTELANHLLSLGSCFYVEDMAWPSLTHRAKKTEISDKTGRIKRKKRFGKSIANKAPAALINILRTKCVSLGIPGVVEVPTSLKASQYNHQSKEYTPKPLSQRWNDMPDGSRIQRDLYSAFLLQHYDPQSGNFDQASLEADYPQFVQLHNQSIQRLLTVPKTPSSMGIRRSVS

SEQ ID NO: 1786 - protein, 525 aa, unidentified
  REGION 1..525: note = Category: MG81 effectors
  REGION 1..525: note = Description: MG81-64 effector
  source 1..525: note = uncultivated organism sequence
MAKNNNDTDTCVLTLPLRVEKWQEDCLLKRFEAARRIYNSLLNFELKKLRQLERTVEYRQIQSVISSAYRSNTKDSPECKDAFKRREKLISANGISENGFKSDVKFFYKHFDGLIGSSVAVHCIAVQLWAAFDKYLSGSGKEIHFKRLGDISSLKGYSVKGKSGGREIIFRGQYIEWTRKKKKLLLPLKIDPDNEYEREMLSRRVKYVRIIKKPGKNRLRWYAQLTLEGKPALKYSAETGKPIHSVGKGNVGIDIGPQTVAYASDKEVALLELADRVTNIEHQKKKLQRKLDRSRRATNPDNYKPDGTIKRGVKLTRNKSKRYLKLQSKLAYIQHRQAEIRKLQHTCLANHMLTLGDRFFVEKMNWPGLAHRAKETSISEKTGRYKRKKRFGKSLANKAPAMFISILKRKCETLGLPGVVEVDTFRLRASQYNHLSDTYEKKSLSERWNYMPISDGSDSSKTKRIQRDLYSAFLLQHTIPQPCSFDKEALRIDYPNFVTMHDAEIHRLESLPKTVTSMDVRRSHS

SEQ ID NO: 1787 - protein, 512 aa, unidentified
  REGION 1..512: note = Category: MG81 effectors
  REGION 1..512: note = Description: MG81-65 effector
  source 1..512: note = uncultivated organism sequence
MPTKQKEGGNRCVLTLPLLTEPWQEHIIEKRFKIIEHLKNQLISIELRKLKNLQRTKAYKNLIKQIESVPKSERTALYKERNKMLKDAGFSQYTFMDDMAGKKSLMQKHFEGHINVQIAHKAAIDVWSSFEKFLFGTGQIVHYQKRGTLSSVASKSPKTGMFYYSDENIFKWSGGGTKPKGGIILCLRVASVKTNYEKEMVANNEIKYYRVVRKWMKTKYKYYLQITFAGKPADKHREISTGRVGIDIGTQTIAIASDKSVKLLELADKVNKNHIKKCELQRKLDRSRRYTNPDNFNPDGTVKRGTKGHKLKWNKSKHYIEIAGKIRELERKNADIRKYQHTCLANDILAMGNQIYIEPMNYKGLQKRAKETQVDEKGRYKKKKRFGKSLANKAPAMFVTILKTKAEQHGGEVYEVDIMSYRASQCDHTTGEYTKHGLNDRWRILGNGDKVQRDLYSAFLIKNSNKTHDEIDLDKCSKTYDNFKKLHDKEIENIRNEVKLRERKNISSYGIA

SEQ ID NO: 1788 - protein, 523 aa, unidentified
  REGION 1..523: note = Category: MG81 effectors
  REGION 1..523: note = Description: MG81-66 effector
  source 1..523: note = uncultivated organism sequence
MPTKQKEGGNRCVLTLPLLTEPWQEHIIEKRFKIIEHLKNQLISIELRKLKNLQRTKAYKNLIKQIESVPKSERTVLYKERNKMLKDAGFSQYTFMDDMAGKKSLMQKHFESHINVQIAHKAAIDVWSSFEKFLFGSGQMIHYQKRGTLKSIASKSPKNGMHYFPESNTFKWSGGKQKKIGQKGEQKKVSIKPISLCLRVSPLKTDYEKEMVANNEIKYYRVVRKWMKTKYKYYLQITFAGKPADKHREISTGRVGIDIGTQTIAIASDKSVKLLELADKVNKNHIKKCELQRKLDRSRRYTNPDNFNPDGTVRRGTKGHKLKWNKSKHYLEIAGKIRELERKNSDIRKYQHTCLANDILAMGNQIYIEPMNYKGLQKRAKETQVDEKGRYKKKKRFGKSLANKAPSMFVTILKTKAEQHGGEVYEVDIMSYRASQCDHTTGEYTKHGLNDRWRILGNGDKVQRDLYSAFLIKNSNKTHDEIDLDKCSKTYDNFKKLHDTEIENIRNEVKLRERKNISSYGIA

SEQ ID NO: 1789 - protein, 511 aa, unidentified
  REGION 1..511: note = Category: MG81 effectors
  REGION 1..511: note = Description: MG81-67 effector
  source 1..511: note = uncultivated organism sequence
MREDSQNTCCLTLPLKIEKWQADRLIKRFEIARQIYNTLVHAELKKLQKMEASAEYRQIQDRIRELNPSDVRAKKEWKILKDKQEKLWKAWKITEYGFKSDIKAYYKYFNENIGSAVATHDIAPRVWAAFEKKLNDRTGKVKIQYKKAGDIRSLKGFSVSGKSGGTEIIFHKTYIAWKGLTLPLKLSPDNAYEKEMLMRRIKYVRILRKPGKHKDRWYAQLSLEGNPVVKLDPVSGLPRHPIGKGAVGIDIGPQTLAYSAEGGADLVELADQVQCIEQEKSRLQRKMDRSRRASNPDNYAQDGTIKRGVKLTHNKSRRYCKLQKELAYMLYRQAETRKRQHRELINRLLTMGDCFYIEDMHWNSLAHRAKKTEISEKTGRYKRKKRFGKSIANKAPAMLVDMLEQKCKSLELDVVMVNTSLKASQYNHQTGKYEKKTLSQRWNYMPDGEQIQRDLYSAFLLQHVVPEKNAFDNEALCRDYPKFVQYHHEVIERLRSLPKTISSMGIRQSVS

SEQ ID NO: 1790 - protein, 511 aa, unidentified
  REGION 1..511: note = Category: MG81 effectors
  REGION 1..511: note = Description: MG81-68 effector
  source 1..511: note = uncultivated organism sequence
MAKCSTDTCCLTLPLRLEKWQEDRLAKRFEIARQIYNTMVRAELKKLRAMEQSEPYKANQEKIQALDWKTQTDKQALKALYKERDKLLRDGGFSEYGFKSDIKNYYKHFNNNIGSNVAFHGIAPQVWAAFEKMLFKKEGKKVHFKKKGDIHSLRGYSAAGKSGGVEIIFRETYIEWKGLKLPLKLSPDNIYETQMLSYRVKYVRLLRKPGKRKDRWYAQLSLEGKPVIKYNPKTGEVRHPIGKGAVGLDIGPQTLAYSAATGADLVELANQVQNVEQEKRRLQRKLDRSRRATNPGNYADDGTIRRGIALTHNKSKRYLRTQQELKYLQHQQAEIRKRQHTELANHLLSLGDCFYVEKMVWTSLTHRAKETEISEKTGKIKRKKRFGKSVANKAPATLIGILQRKSAALGIPGVIEVPTSVKASQYNHQSGTYTPKPLSQRWNNMPDGERIQRDLYSAFLLQHYDPQTNTFDANSLHQDYPQFVQYHHDAVLRLYAMPKTPSSMGIKRSLR

SEQ ID NO: 1791 - protein, 523 aa, unidentified
  REGION 1..523: note = Category: MG81 effectors
  REGION 1..523: note = Description: MG81-69 effector
  source 1..523: note = uncultivated organism sequence
MPTKQKEGGNRCVLTLPLLTEPWQEHIIEKRFKIIEHLKNQLISIELRKLKNLQRTKAYKNLIKQIESVPKSERTALYKERNKMLKDAGFSQYTFMDDMAGKKSLMQKHFESHINVQIAHKAAIDVWSSFEKFLFGSGQMIHYQKRGTLKSIASKSPKNGMHYFPESNTFKWSGGKQKKIGQKGEQKKVSIKPISLCLRVSPLKTDYEKEMVANNEIKYYRVVRKWMKTKYKYYLQITFAGKPADKHREISTGRVGIDIGTQTIAIASDKSVKLLELADKVNKNHIKKCELQRKLDRSRRYTNPDNFNPDGTVRRGTKGHKLKWNKSKHYLEIAGKIRELERKNSDIRKYQHTCLANDILAMGNQIYIEPMNYKGLQKRAKETQVDEKGRYKKKKRFGKSLANKAPSMFVTILKTKAEQHGGEVYEVDIMSYRASQCDHTTGEYTKHGLNDRWRILGNGDKVQRDLYSAFLIKNSNKTHDEIDLDKCSKTYDNFKKLHDKEIENIRNEVKLRERRNISSYGIA

SEQ ID NO: 1792 - protein, 529 aa, unidentified
  REGION 1..529: note = Category: MG81 effectors
  REGION 1..529: note = Description: MG81-70 effector
  source 1..529: note = uncultivated organism sequence
MILLAKKNNNDTDTCVLTLPLRVEKWQEDCLLKRFEAARRIYNSLLNFELKKLRQLERTVEYRQIQSVISSAYRSNTKDSPECKDAFKRREKLISANGISEYGFKSDVKFFYKHFDGLIGSSVAVHCIAVQLWAAFDKYLSGSGKEIHFKRLGDISSLKGYSVKGKSGGREIIFRGQYIEWTRKKKKLLLPLKIDPDNEYEREMLSRRVKYVRIIKKPGKNRLRWYAQLTLEGKPALKYSAGTGKPIHSVGKGDVGIDIGPQTVAYASDKEVALLELADRVTNIEHQKKKLQRKLDRSRRATNPDNYKPDGTIKRGVKLTHNKSKRYLKLQSKLAYIQHRQAEIRKLQHTCLANHMLTLGDRFFVEKMNWPGLAHRAKETSISEKTGRYKRKKRFGKSLANKAPAMFISILKRKCETLGLPGVVEVDTYSLKASQYNHLSDTYEKKSLSERWNYMPISDGSDSSKTKRIQRDLYSAFLLQHTIPQPCSFDKEALRIDYPNFVTMHDAEIHRLGSLPKTITSMGVRRSHS

SEQ ID NO: 1793 - protein, 512 aa, unidentified
  REGION 1..512: note = Category: MG81 effectors
  REGION 1..512: note = Description: MG81-71 effector
  source 1..512: note = uncultivated organism sequence
MKKSSTDTCCLTLPLKLEKWQEDRLAKRFEIARQLYNTLVHAELKRLAQVKQTAEYRENERKIRTLDWNDPGDQAKLKGLYKERRKSLKTAGFTDYSFTTDMGKYYKHFRDNIGSSVAVHGIAPQVWAAFDKLLFKKGGKKVHYKKPGEVNSVQGYSRTGKSGGTEIMFRGPYIEWKGLKLPLKLSPDNAYETDMLQRRVKLVRLVRRPGKRRDRWYAQLVLEGKPAIKADPVTGKAVHPIGSGPVGLDIGPQTLAYSAAGAAGLVELADRVQNIEQEKRCLQRKMGRSRRATNPDNYAEDGTIRRGVKLTHNKSKRYRRSQQELKYLQRRQAEIRKLQHIQLANHLLSLGDHFYVEKMEWSSLTHRAKKTVISEKTGKPRSKKRFGKSIANKAPAMLIEILRQKCKSLGLPNVVEINPADIKASQYNHLTGEYVKKSLSRRWNEMQDGEHLQRDLYSAFLLQHYDSMSKALDLDSLARDYPAFVQYHHREIERLHALPKTPASMGIRRSIA

SEQ ID NO: 1794 - protein, 1362 aa, unidentified
  REGION 1..1362: note = Category: MG81 effectors
  REGION 1..1362: note = Description: MG81-72 effector
  source 1..1362: note = uncultivated organism sequence
MKISKIKNSRPGISVTENKNEEQLSRQSLLYYAPVKDGKIRLESKDLEQHVTECNEKAQKLYNVITPEINFYRDENRQKMVENLARNFNAVINNALRSIRNPKEKKERRVEKEVAFILNLSKKSIKLKENVFVKSTDLIVKFPENNKYNKKNSKGTGSKEAYIQKMISDLVLRKLKNTLRKEVKLENGCRMQMTEITISLMSAICLYGNAESFDPAILKAFFEKVDSDYTKYKYVEQIVKSIESQSAKLKVVEKDGRHLLISANADHRKKKYVFEFMRMYAAADEKEKRELTEHIQDLIGLYLCGKAGYENAENRFSDMIESHNCICGKIEEILNELEEPENLSQQKKEKLKNTTVKVMALKYRAAVNYLADEVGKTVLGEIREKKVRSCADLYWIEYIDSTVEKLLLKSRNKDGYRYEIGFLSKHIWKEWTQYISGKYIEMGKGVYHFAIPDLSGALEGESVSICEVKPEYRNGVSGFDYERIRAEESLEREMEKYVLFAVNNFARAVTPEEEREKSGHEDVLLMKTLSEIEESQTKEERQKKHDNNVKNAITLYADADRRILQFFGGQSRFREKEDSLINLYSGEDLYKEIRKELYAIRNITFHYTTKAEKDQTQKHDLAEYLFEEEFSDITELFREKYYANNVWKYYDAEVINTIMENIYCGRKYRAAQVPAFKNIISRPELPQVMNGFVKGNSLRRLMNCPDRDVINKYWSALFFVLKELYYYDFLQEQKRPEDNVKERFFRAIKKLSGQEKGDKEQKAWESFENRIDQIGRDRSFGAICQGLMIEYMLQNSDISMVQTETDNGKANNKKQIYKHYRTLLYNCISEAFIEYLREKWKELRTPVLTAKEWSKEEFCRADGLKHLSLFDHLKETFNDAESGSSWYMAAHFINQKYLNHLLGSIRNYLQFTEDIEDRAISLGDCVDNKREEKNLRYRNTLEILEFVAQFCERTTNVMEDYFESNQEYAEYLSGFVDYNTTKKETDIEKALYSFCKQKFKVDGKEYMAGIYYDGENLIPNRNIIRANMYGTTSCLKPCMDRITLKEIRTMYADQNKLDLVLKEGVCHTEEEQKAYREYQNEKNRIELFDVCTYTQILNDMQARLIGWSYMRERDLMYYQLGYYYTKLFWTDSISEEDARRRLVGNLVNVEDGAILYQILAFNSYNLPIIANKNNTVTLLKDEGSIGGKAITAFFKNYENAEMIYEEALDLFENMDEHAAIINTRNYIEHFKYFIKSDRSMMDLYSEIYDRFFRHDHNRKKNVPDSLKNVLADNFMIVDIDMELGSKKVGEKKKGFREHKAARIEFTDSGIRSTDMTYTIKPDIKDNKKDNKKDKKVLVPARSEVFLKQFRKILEYRIQDKTQ

SEQ ID NO: 1795 - protein, 512 aa, unidentified
  REGION 1..512: note = Category: MG81 effectors
  REGION 1..512: note = Description: MG81-73 effector
  source 1..512: note = uncultivated organism sequence
MPTKQKEDSNRCVLTLPLLTELWQEHIIEKRFKIIEHLKNQLISKELRKLKNLQRTKAYKNLMKRIESVPKSERTALYKERNKMLKDAGFSQYAFMDDMAGKKSLMQKHFESHINVQIAHKAAIDVWSSFEKFLFGTGQIVHYQKRGTLSSIASKSPKTGMFYYSDENIFKWSGGGTKPKGGIILCLRVASVKTNYEKEMVANNEIKYYRVVRKWMKTKYKYYLQITFAGKPADKHREISTGRVGIDIGTQTIAIASDKSVKLLELADKVNKNHIKKCELQRKLDRSRRYTNPDNFNPDGTVKRGTKGHKLKWNKSKHYIEIAGKIRELERKNADIRKYQHTCLANDILAMGNQIYIEPMNYKGLQKRAKETQVDEKGRYKKKKRFGKSLANKAPAMFVTILKTKAEQHGGEVYEVDIMSYRASQCDHTTGEYTKHGLNDRWRILGNGDKVQRDLYSAFLIKNSNKTHDEIDLDKCSKTYDNFKKLHDKEIENIRNEVKLRERKNISSYGIA

SEQ ID NO: 1796 - protein, 530 aa, unidentified
  REGION 1..530: note = Category: MG81 effectors
  REGION 1..530: note = Description: MG81-74 effector
  source 1..530: note = uncultivated organism sequence
MILLAKNNNNNNTDTCVLTLPLRVEKWQEDCLLKRFEAARRIYNSLLNFELKKLRQLERTVEYRQIQSVISSAYRSNTKDSPECKDAFKRREKLISANGISKNGFKSDVKFFYKHFDGLIGSSVAVHCIAVQLWAAFDKYLSGSGKEIHFKRLGDISSLKGYSVKGKSGGCEIIFRGQYVEWTRKKKKLLLPLKIDPDNEYEREMLSRRVKYVRIIKKPGKNRLRWYAQLTLEGKPALKYSAETGKPIHSVGKGNVGIDIGPQTVAYASDKEVALLELADRVTNIEHQKKKLQRKLDRSRRATNPDNYKPDGTIKRGVKLTRNKSKRYLKLQSKLAYIQHRQAEIRKLQHTCLANHMLTLGDRFFVEKMNWPGLAHRAKETSISEKTGRYKRKKRFGKSLANKAPAMFISILKRKCETLGLPGVVEVDTYNLKASQYNHLSDTCEKKSLSERWNYMPISDGSDSSKTKRIQRDLYSAFLLQHTIPQPCSFDKEALRIDYPNFVIMHDAEIHRLESLPKTITSMGVRRSHS

SEQ ID NO: 1797 - protein, 528 aa, unidentified
  REGION 1..528: note = Category: MG81 effectors
  REGION 1..528: note = Description: MG81-75 effector
  source 1..528: note = uncultivated organism sequence
MILLTKNNNNTDTCVLTLPLRVEKWQEDCLLKRFEAARRIYNSLLNFELKKLRQLERTVEYRQIQSVISSAYRSNTKDSPECKDAFKRREKLISANGISEYGFKSDVKFFYKHFDGLIGSNVAVHCIAGQLWAAFDKYLRGSGKEIHFKRLGDISSLKGYSVKGKSGGCEIIFRGQYIEWTRKKKKLLLPLKIDPDNEYEREMLSRRVKYVRIIKKPGKNRLRWYAQLTLEGKPALKYSAETGKPIHSVGKGNVGIDIGPQTVAYASDKEVALLELADRVTNIEHQKKKLQRKLDRSRRATNPDNYKPDGTIKRGVKLTRNKSKRYLKLQSKLAYIQHRQAEIRKLQHTCLANHMLTLGDRFFVEKMNWPGLAHRAKETSISEKTGRYKRKKRFGKSLANKAPAMFISILKRKCETLGLPGVVEVDTYSLKASQYNHLSDTYEKKSLSERWNYMPISDGSDSSKTKRIQRDLYSAFLLQHTIPQPCSFDKKALRIDYPNFVTMHDAEIHRLESLPKTITSMGVRRSHS

SEQ ID NO: 1798 - protein, 512 aa, unidentified
  REGION 1..512: note = Category: MG81 effectors
  REGION 1..512: note = Description: MG81-76 effector
  source 1..512: note = uncultivated organism sequence
MPTKQKEGGNRCVLTLPLLTEPWQEHIIEKRFKIIEHLKNQLISIELRKLKNLQRTKAYKNLMKRIESVPKSERTALYKERNKMLKDAGFSQYTFMDDMAGKKSLMQKHFESHINVQIAHKAAIDVWSSFEKFLFGSGQMIHYQKRGTLSSVASKSPKTGMFYYSDENIFKWSGGGTKPKGGIILCLRVASVKTNYEKEMVANNEIKYYRVVRKWMKTKYKYYLQITFAGKPADKHREISTGRVGIDIGTQTIAIASDKSVKLLELADKVNKNHMKKCELQRKLDRSRRYTNPDNFNPDGTVKRGTKGHKLKWNKSKHYIEIAGKIRELERKNADIRKYQHTCLANDILTMGNQIYIEPMNYKGFQKRAKETQVDEKGRYKKKKRFGKSLANKAPAMFVTILKTKAEQHGGEVYEVDIMSYRASQCDHTTGEYTKHGLNDRWRILGNGDKVQRDLYSAFLIKNSNKTHDEIDLDKCSKTYDSFKKLHDKEIENIRNEVILRERRNISSYGIA

SEQ ID NO: 1799 - protein, 529 aa, unidentified
  REGION 1..529: note = Category: MG81 effectors
  REGION 1..529: note = Description: MG81-77 effector
  source 1..529: note = uncultivated organism sequence
MILLANNNNNNTDTCVLTLPLRVEKWQEDCLLKRFEAARRIYNSLLNFELKKLRQLERTVEYRQIQSVISSAYRSNTKDSPECKDAFKRREKLISANGISKNGFKSDVKFFYKHFDGLIGSSVAVHCIAVQLWAAFDKYLSGSGKEIHFKRLGDISSLKGYSVKGKSGGCEIIFRGQYVEWTRKKKKLLLPLKIDPDNEYEREMLSRRVKYVRIIKKPGKNRLRWYAQLTLEGKPALKYSAETGKPIHSVGKGNVGIDIGPQTVAYASDKEVALLELADRVTNIEHQKKKLQRKLDRSRRATNPDNYKPDGTIKRGVKLTRNKSKRYLKLQSKLAYIQHRQAEIRKLQHTCLANHMLTLGDRFFVEKMNWPGLAHRAKETSISEKTGRYKRKKRFGKSLANKAPAMFISILKRKCETLGLPGVVEVDTYNLKASQYNHLSDTCEKKSLSERWNYMPISDGSDSSKTKRIQRDLYSAFLLQHTIPQPCSFDKEALRIDYPNFVIMHDAEIHRLESLPKTITSMGVRRSHS

SEQ ID NO: 1800 - protein, 511 aa, unidentified
  REGION 1..511: note = Category: MG81 effectors
  REGION 1..511: note = Description: MG81-78 effector
  source 1..511: note = uncultivated organism sequence
MREDSQNTCCLTLPLKIEKWQADRLIKRFEIARQIYNTLVHAELKKLQKMEASAEYRQIQDRIRELNPSDARAKKEWKILKDKQEKLWKAWKITEYGFKSDIKAYYKYFNENIGSAVATHDIAPQVWAAFEKKLNDRTGKVKIQYKKAGDIRSLKGFSVSGKSGGTEIIFHKTYIAWKGLTLPLKLSPDNAYEKEMLMRRIKYVRILRKPGKHKDRWYAQLSLEGNPVVKLDPVSGLPRHPIGKGAVGIDIGPRTLAYSAEGGADLVELADQVQCIEQEKSRLQRKMDRSRRASNPDNYAQDGTIKRGVKLTHNKSRRYCKLQKELAYMLYRQAETRKRQHRELINRLLTMGDCFYIEDMHWNSLAHRAKKTEISEKTGGYKRKKRFGKSIANKAPAMLVDMLEQKCKSLELDVVMVNTSLKASQYNHQTGKYEKKTLSQRWNHMPDGEQIQRDLYSAFLLQHVVPEKNAFDNEALCRDYPKFVQYHHEVIERLRSLPKTISSMGIRRSVS

SEQ ID NO: 1801 - protein, 524 aa, unidentified
  REGION 1..524: note = Category: MG81 effectors
  REGION 1..524: note = Description: MG81-79 effector
  source 1..524: note = uncultivated organism sequence
MAKNNNTDTCVLTLPLRVEKWQEDCLLKRFEAARRIYNSLLNFELKKLRQLERTVEYRQIQSVISSAYRSNTKDSPECKDAFKRREKLISANGISEYGFKSDVKFFYKHFDGLIGSNVAVHCIAVQLWAAFDKYLRGSGKEIHFKRLGDISSLKGYSVKGKSDGREIIFRGQYIEWTRKKKKLLLPLKIDPDNEYEREMLSRRVKYVRIIKKPGKNRLRWYAQLTLEGKPALKYSAGTGKPIHSVGKGNVGIDIGPQTVAYASDKEVALLELADRVTNIEHQKKKLQRKLDRSRRATNPDNYKPDGTIKRGVKLTRNKSKRYLKLQSKLAYIQHRQAEIRKLQHTCLANHMLTLGDRFFVEKMNWPGLAHRAKETSISEKTGRYKRKKRFGKSLANKAPAMFISILKRKCETLGLPGVVEVDTYSLKASQYNHLSDTYEKKSLSERWNYMPISDGSDSSKTKRIQRDLYSAFLLQHTIPQPCSFDKEALRIDYPNFVTMHDAEIHRLESLPKTVTSMGVRRSHS

SEQ ID NO: 1802 - protein, 532 aa, unidentified
  REGION 1..532: note = Category: MG81 effectors
  REGION 1..532: note = Description: MG81-80 effector
  source 1..532: note = uncultivated organism sequence
MILLAKKNNNNNNNTDTCVLTLPLRVEKWQEDCLLKRFEAARRIYNSLLNFELKKLRQLERTVEYRQIQSVISSAYRSNTKDSPECKAALKRREKLIDENGLTKNGFKNDVKFFYKHFDGLIGSSVAVHCIAVQLWAAFNKYLCGNGKEIHFKRLGDISSLKGYSVKGKSGGCEIIFRGQYVEWTRKKKKLLLPLKIDPDNEYEREMLSRRVKYVRIIKKPGKNRLRWYAQLTLEGKPALKYSAETGKPIHSVGKGDVGIDIGPQTVAYASDKEVALLELADRVTNIEHQKKKLQRKLDRSRRATNPDNYKPDGTIKRGVKLTRNKSKRYLKLQSKLAYIQHRQAEIRKLQHTCLANHMLTLGDRFFVEKMNWPGLAHRAKETSISEKTGRYKRKKRFGKSLANKAPAMFISILKQKCETLGLPGVVEVDTFRLKASQYNHLSDTCEKKSLSERWNYMPISDGSDSSKTKRIQRDLYSAFLLQHTIPQSCSFDKEALRIDYPNFVTMHDAEIHRLESLPKTITSMGVRRSHS

SEQ ID NO: 1803 - protein, 512 aa, unidentified
  REGION 1..512: note = Category: MG81 effectors
  REGION 1..512: note = Description: MG81-81 effector
  source 1..512: note = uncultivated organism sequence
MKKSSTDTCCLTLPLKLEKWQEDRLAKRFEIARQLYNTLVHAELKRLVQIKRTAEYLENEQKIRALDRNNPADRAKLQELYKEQRKSLKTAGFTDYSFTTDMGKYYKHFRDNIGSSVAVHGIAPQVWAAFDKVLFKKGGKKVHYKKPGEVNSVQGYSRTGKSGGTEIMFRGPYIEWKGLKLPLKLSPDNAYETDMLQRRVKLVRLVRRPGKRRDRWYAQLVLEGKPAIKADPVTGKAVHPIGSGPVGLDIGPQTLAYSAAGVAGLVELADRVQNIEQEKRCLQRKMDRSRRAANPDNYAEDGTIRRGVKLTHNKSKRYRRSQQELKYLQHRQAEIRKLQHIQLANHLLSLGDHFYVEKMEWSSLTHRAKKTVISEKTGKPRSKKRFGKSIANKTPAMLIEILRQKCKSLGLLNVVEINPADIKASQYNHLTGEYVKKSLSRRWNEMQDGEHLQRDLYSAFLLQHYDSMSKALDLDSLARDYPAFVQYHHREIERLHALPKTPASMGIRRSIA

SEQ ID NO: 1804 - protein, 554 aa, unidentified
  REGION 1..554: note = Category: MG81 effectors
  REGION 1..554: note = Description: MG81-82 effector
  source 1..554: note = uncultivated organism sequence
MDNEEKKEDGATCCLTLPLKLEKWQSDHLEKRFEIARQLYNTLVHAELKRIHRIERMPEYREIERLIEATTDKKEKWALKNQKKQFLRKNGINRNTFTTDMKRLYKHFNDNIGSNVAQHGIVSQVLTAFEKVYIENQSGEVHFKKPGDLRSVQGYSQKESGGKEIMFRNGKIIWTQQENDDRKKSPKYQQRKKRQNYKGVKGIAREFPVVFSKNNPYEAEMLTKHVKFVRILRKDGKTKPHWYAQLVLEGKPAIKRDPASGAPKHPVGHGVVGIDIGTRTLAYSTDKEVNLLELADRVQNIEQEKRRLQRKMDRSRRAMNPENYNSDGTFKRGVKLTRNKSKRYRRIQHQLAMIQHHQADIRKQQHNELANYLLTLGDCFFVENMSYCDLVHRANKTEISEKTGRYKRKKRFGKSIANKAPAMLITMLKQKCQSRGLKGVKEVDTHVRASQYNHQTDTCIEKALENRWNVMPDGERIQRDLYSAFLLQHCKQGLPKYNRKELKKEFGEELYRVFDREALQRDYPQFVAYHHMTIQRLSELPHTIPSMGIRRIIS

SEQ ID NO: 1805 - protein, 512 aa, unidentified
  REGION 1..512: note = Category: MG81 effectors
  REGION 1..512: note = Description: MG81-83 effector
  source 1..512: note = uncultivated organism sequence
MPTKQKEDSNRCVLTLPLLTEPWQEHIIEKRFKIIEHLKNQLISIELRKLKNLQRTKAYKNLMKRIESVPKSERTALYKERNKMLKDAGFSQYTFMDDMAGKKSLMQKHFESHINVQIAHKAAIDVWSSFEKFLFGTGQIVHYQKRGTLSSVASKSPKTGMFYYSDENIFKWSGGGTKPKGGIILCLRVASVKTNYEKEMVANNEIKYYRVVRKWMKTKYKYYLQITFAGKPADKHREISTGRVGIDIGTQTIAIASDKSVKLLELVDKVNKNHIKKCELQRKLDRSRRYTNPDNFNPDGTVKRGTKGHKLKWNKSKHYLEIAGKIRELERKNTDIRKYQHTCLANDILAMGNQIYIEPMNYKGLQKRAKETQVDEKGRYKKKKRFGKSLANKAPAMFVTILKTKAEQHGGEVYEVDIMSYRASQCDHTTGEYTKHGLNDRWRILGNGDKVQRDLYSAFLIKNSNKTHDEIDLDKCSKTYDSFKKLHDKEIENIRNEVILRKRRNISSYGIA

SEQ ID NO: 1806 - protein, 512 aa, unidentified
  REGION 1..512: note = Category: MG81 effectors
  REGION 1..512: note = Description: MG81-84 effector
  source 1..512: note = uncultivated organism sequence
MPTKQKEGGNRCVLTLPLLTEPWQEHIIEKRFKIIEHLKNQLISIELRKLKNLQRTKAYKNLIKQIESVPKSERTALYKERNKMLKDAGFSQYTFMDDMAGKKSLMQKHFESHINVQIAHKAAIDVWSSFEKFLFGTGQIVHYQKRGTLSSVASKSPKTGMFYYSDENIFKWSGGGTKPKGGIILCLRVASVKTNYEKEMVANNEIKYYRVVRKWMKTKYKYYLQITFAGKPADKHREISTGRVGIDIGTQTIAIASDKSVKLLELADKVNKNHIKKCELQRKLDRSRQYTNPDNFNPDGTVGRGTKGHKLKWNKSKHYLEIAGKIRELERKNADIRKYQHSCLANDILAMGNQIYIEPMNYKGLQKRAKETQVDEKGRYKKKKRFGKSLANKAPAMFVTILKTKAEQHGGEVYEVDIMSYRASQCDHTTGEYTKHGLNDRWRILGNGDKVQRDLYSAFLIKNSNKTHDEIDLDKCSKTYDNFKKLHDKEIENIRNEVILRKRRNISSYGIA

SEQ ID NO: 1807 - protein, 505 aa, unidentified
  REGION 1..505: note = Category: MG81 effectors
  REGION 1..505: note = Description: MG81-85 effector
  source 1..505: note = uncultivated organism sequence
MGKEEDKEPRCVLTLPLYPEPWQVDIIEKRFHIMEHIENSLTAIELRKLKNVERAKKYKDVVAAIKEEKDDKKRSKLWKERNKLLKDAGINQFDFIKDVSLLQKHFASHIAQKVAAAAARTHVWSSFDRVVFGNGRKIHFHKKGDLKSITSGYFGVSMTVKNGYFIWSGGTKDEKDRKVNPITISIRIKQPETYYEKEMLQKQIKYVTIVRKWIKNKYKYYLQFMLVGNPVVKPRTIANGKRVGIDIGTSSAAIVSGKEIKLVELADHIQNNYDKEIQLQRSMDRSRRVMNPQNFNEDGTIKRGIKLIWIESKHYKEMKGQVRELERKNADIRKYQHTCLANYVLSLGTEVYIEQMSFKGLQRKVKETKYDKNGKPKRKKRFGKSIANRAPATFVMILKNKLSGIAGEELHKVNTFTFKASQYDHTNNTYQKKLLGHRWAKLSNGDKIQRDLYSAFLLMNSDTDMQYTDQNKCKRNYKKFKIQHDELIKAMQESSKRYPKSFGIN

SEQ ID NO: 1808 - protein, 538 aa, unidentified
  REGION 1..538: note = Category: MG81 effectors
  REGION 1..538: note = Description: MG81-86 effector
  source 1..538: note = uncultivated organism sequence
MNNEEKEKEGATCCLTLPLKLEKWQSDHLEKRFEIARQLYNTLVHAELKKKCQVERMPEYQEIMKMIDTASNQKEKWALEKKRKAFLEENGFSRNAFKADMEKYYKHFNDNIGANVALHGITAQVWIAFDKVFVDNYKQKGKVHFKKPGELCSVQGYSQKKSGGKEIMFREDRIIWNQQGNRDRKKVKREFLLKLSPNNPYEAEMLKRHVKFVRILRKDGKTKPHWYAQLVLEGKPAVKRDPISSAPKHPVGHGVVGIDIGTRTLAYSTDKEVNLLELADHVQNIEQEKRRLQRKMDRSRRATNPENYNPDGTFKRGVKLTRNKSKRYRRIQHQLAMIQHHQADIRKQQHNELANYLLTLGDCFFVENMSYCDLAHRANKTEISEKTGRYKRKKRFGKSIANKAPAMLITMLKQKCQSRGLEGVKEVDTHVCASQYNHQTDTCIKKALENRWNIMPDGERIQRDLYSAFLLQHCRRDLPEYNRKELQKEFGEELYRVFDREALQRDYPQFVAYHHMTIQRLSELPHTIPSMGIRRIIS

SEQ ID NO: 1809 - protein, 512 aa, unidentified
  REGION 1..512: note = Category: MG81 effectors
  REGION 1..512: note = Description: MG81-87 effector
  source 1..512: note = uncultivated organism sequence
MPTKQKEDSNRCVLTLPLLTEPWQEHIIEKRFKIIEHLKNQLISIELRKLKNLQRTKAYKNLIKQIESVPKSERTALYKERNKMLKDAGFSQYTFMDDMAGKKSLMQKHFESHINVQIAHKAAIDVWSSFEKFLFGSGQMIHYQKRGTLSSVASKSPKTGMFYYSDENIFKWSGGGTKPKGGIILCLRVASVKTNYEKEMVANNEIKYYRVVRKWMKTKYKYYLQITFAGKPADKHREISTGRVGIDIGTQTIAIASDKSVKLLELADKVNKNHIKKCELQRKLDRSRRYTNPDNFNPDGTVKRGTKGHKLKWNKSKHYIEIAGKIRELERKNADIRKYQHTCLANDILAMGNQIYIEPMNYKGLQKRAKETQVDEKGRYKKKKRFGKSLANKAPAMFVTILKTKAEQHGGEVYEVDIMSYRASQCDHTTGEYTKHGLNDRWRILGNGDKVQRDLYSAFLIKNSNKTHDEIDLDKCSKTYDNFKKLHDKEIENIRNEVILRKRRNISSYGIA

SEQ ID NO: 1810 - protein, 530 aa, unidentified
  REGION 1..530: note = Category: MG81 effectors
  REGION 1..530: note = Description: MG81-88 effector
  source 1..530: note = uncultivated organism sequence
MILLANNNNNNNTDTCVLTLPLRVEKWQEDCLLKRFEAARRIYNSLLNFELKKLRQLERTVEYRQIQSVISSAYRSNTKDSPECKAALKRREKLIDENGLTKNGFKNDVKFFYKHFDGLIGSSVAVHCIAVQLWAAFNKYLRGNGKEIHFKRLGDISSLKGYSVKGKSGGCEIIFRGQYVEWTRKKKKLLLPLKIDPDNEYEREMLSRRVKYVRIIKKPGKNRLRWYAQLTLEGKPALKYSAETGKPIHSVGKGDVGIDIGPQTVAYASDKEVALLELADRVTNIEHQKKKLQRKLDRSRRATNPDNYKPDGTIKRGVKLTRNKSKRYLKLQSKLAYIQHRQAEIRKLQHTCLANHMLTLGDRFFVEKMNWPGLAHRAKETSISEKTGRYKRKKRFGKSLANKAPAMFISILKQKCETLGLPGVVEVDTFRLKASQYNHLSDTCEKKSLSERWNYMPISDGSDSSKTKRIQRDLYSAFLLQHTIPQSCSFDKEALRIDYPNFVTMHDAEIHRLESLPKTITSMGVRRSHS

SEQ ID NO: 1811 - protein, 528 aa, unidentified
  REGION 1..528: note = Category: MG81 effectors
  REGION 1..528: note = Description: MG81-89 effector
  source 1..528: note = uncultivated organism sequence
MILLANNNNNTDTCVLTLPLRVEKWQEDCLLKRFEAARRIYNSLLNFELKKLRQLERTVEYRQIQSVISSAYRSNTKDSLECKDAFKRRKKLTDENGISEYGFKSDVKFFYKHFDGLIGSNVAVHCIAVQLWAAFDKYLRGSGKEIHFKRLGDISSLKGYSVKGKSGGCEIIFRGQYVEWTRKKKKLLLPLKIDPDNEYEREMLSKRVKYVRIIKKPGKNRLRWYAQLTLEGKPALKYSAETGKPIHSVGKGNVGIDIGPQTVAYASDKEVALLELADRVTNIEHQKKKLQRKLDRSRRATNPDNYKPDGTIKRGVKLTRNKSKRYLKLQSKLAYIQHRQAEIRKLQHTCLANHMLTLGDRFFVEKMNWPGLAHRAKETSISEKTGRYKRKKRFGKSLANKAPAMFISILKRKCETLGLPGVVEVDTYSLKASQYNHLSDTYEKKSLSERWNYMPISDGSDSSKTKRIQRDLYSAFLLQHTIPHPCSFDKEALRIDYPNFVIMHDAEIHRLEFLPKTVTSMGVRRSHS

SEQ ID NO: 1812 - protein, 505 aa, unidentified
  REGION 1..505: note = Category: MG81 effectors
  REGION 1..505: note = Description: MG81-90 effector
  source 1..505: note = uncultivated organism sequence
MGKEEDKEPRCVLTLPLYPEPWQVDIIEKRFHIMERIENSLTAIELRKLKNVERAKKYKDVVAGIKEEKDDKKRSKLWKERNKLLKDAGINQFDFIKDVSLLQKHFASHIAQKVAAAAARTHVWSSFDRVVFGNGRKIHFHKKGDLKSITSGYFGVSMTVKNGYFIWSGGTKDEKDRKVNPITISIRIKQPETYYEKEMLQKQIKYVTIVRKRIKNRYKYYLQFMLVGNPVAKPRTIANGKRVGIDIGTSSAAIVSGKEIKLVELADHIQNNYDKEIQLQRSMDRSRRAMNPQNFNEDGTIKRGIKLIWIESKHYKEMKGQVRELERKNADIRKYQHTCLANYVLSLGTEVYIEQMSFKGLQRKVKETKYDKNGKPKRKKRFGKSIANRAPATFVMILKNKLSGIAGEELHKVNTFTFKASQYDHTNNTYQKKLLGHRWAKLSNGDKIQRDLYSAFLLMNSDTDMQYTDQNKCKRNYKKFKIQHDELIKAMQESSKRYPKSFGIN

SEQ ID NO: 1813 - protein, 512 aa, unidentified
  REGION 1..512: note = Category: MG81 effectors
  REGION 1..512: note = Description: MG81-91 effector
  source 1..512: note = uncultivated organism sequence
MPTKQKEGGNRCVLTLPLLTEPWQEHIIEKRFKIIEHLKNQLISIELRKLKKLQRTKAYKNLIKQIESVPKSERTVLYKERNKMLKDAGFSQYTFMDDMAGKKSLMQKHFESHINVQIAHKAAIDVWSSFEKFLFGTGQIVHYQKRGTLSSVASKSPKTGMFYYSDENIFKWSGGGTKPKGGIILCLRVASLKTNYEKEMVANNEIKYYRVVRKWMKTKYKYYLQITFAGKPADKHREISTGRVGIDIGTQTIAIASDKSVKLLELADKVNKNHIKKCELQRKLDRSRRYTNPDNFNPDGTVKRGTKGHKLKWNKSKHYLEVAGKIRELERKNADIRKYQHTCLANDILAMGNQIYIEPMNYKGLQKRAKETQVDEKGRYKKKKRFGKSLANKAPAMFVTILKTKAEQHGGEVYEVDIMSYRASQCDHTTGEYTKHGLNDRWRILGNGDKVQRDLYSAFLIKNSNKTHDEIDLDKCSKTYDSFKKLHDKEIENIRNEVILRKRRNISSYGIA

SEQ ID NO: 1814 - protein, 512 aa, unidentified
  REGION 1..512: note = Category: MG81 effectors
  REGION 1..512: note = Description: MG81-92 effector
  source 1..512: note = uncultivated organism sequence
MPTKQKEDSNRCVLTLPLLTEPWQEHIIEKRFKIIEHLKNQLISIELRKLKKLQRTKAYKNLIKQIESVPKSERTVLYKERNKMLKDAGFSQYTFMDDMAGKKSLMQKHFESHINVQIAHKAAIDVWSSFEKFLFGSGQMIHYQKRGTLSSVASKSPKTGMFYYPDENIFKWSGGGTKPKGGIILCLRVASVKTNYEKEMVANNEIKYYRVVRKWMKTKYKYYLQITFAGKPADKHREISTGRVGIDIGTQTIAIASDKSVKLLELADKVNKNHIKKCELQRKLDRSRRYTNPDNFNPDGTVKRGTKGHKLKWNKSKHYIEIAGKIRELERKNADIRKYQHTCLANDILAMGNQIYIEPMNYKGLQKRAKETQVDEKGRYKKKKRFGKSLANKAPAMFVTILKTKAEQHGGEVYEVDIMSYRASQCDHTTGEYTKHGLNDRWRILGNGDKVQRDLYSAFLIKNSNKTHDEIDLDKCSKTYDNFKKLHDKEIENIRNEVILRKRRNISSYGIA

SEQ ID NO: 1815 - protein, 511 aa, unidentified
  REGION 1..511: note = Category: MG81 effectors
  REGION 1..511: note = Description: MG81-93 effector
  source 1..511: note = uncultivated organism sequence
MAKCSTDTCCLTLPLRLEKWQEDRLAKRFEIARQIYNTMVRAELKKLRAMEQSEPYKANQEKIQALDRKTQTDKQALKALYKERDKLLRDGGFSEYGFKSDIKNYYKHFNNNIGSNVAFHGIAPQVWAAFEKMLFKKEGKKVHFKKKGDIHSLRGYSATGKSGGVEIIFRETYIEWKGLKLPLKLSPDNIYETQMLSYRVKYVRLLRKPGKRKDRWYAQLSLEGKPVIKYNPKTGEVRHPIGKGAVGLDIGPQTLAYSAATGADLVELANQVQNVEQEKRRLQRKLDRSRRATNPGNYADDGTIRRGIALTHNKSKRYLRTQQELKYLQHQQAEIRKRQHTELANHLLSLGDCFYVEKMVWTSLTHRAKETEISEKTGKIKRKKRFGKSVANKAPATLIGILQRKSAALGIPGVIEVPTSVKASQYNHQSGTYTPKPLSQRWNNMPDGERIQRDLYSAFLLQHYDPQTNTFDANSLHQDYPQFVQYHHDAVLRLYAMPKTPSSMGIKRSLR

SEQ ID NO: 1816 - protein, 512 aa, unidentified
  REGION 1..512: note = Category: MG81 effectors
  REGION 1..512: note = Description: MG81-94 effector
  source 1..512: note = uncultivated organism sequence
MKKSSTDTCCLTLPLKLEKWQEDRLAKRFEIARQLYNTLVHAELKRLAQVKQTAEYRENERKIRALDWNDPGDQAKLKGLYKERRKSLKTAGFTDYSFTTDMGKYYKHFRDNIGSSVAVHGIAPQVWAAFDKLLFKKGGKKVHYKKPGEVNSVQGYSRTGKSGGTEIMFRGPYIEWKGLKLPLKLSPDNAYETDMLQRRVKLVRLVRRPGKRRDRWYAQLVLEAKPAIKADPVTGKAVHPIGSGPVGLDIGPQTLAYSAAGAAGLVELADRVQNIEQEKRCLQRKMDRSRRATNPDNYAEDGTIRCGVKLTHNKSKRYRRSQQELKYLQHRQAEIRKLQHIQLANHLLSLGDHFYVEKMEWSSLTHRAKKTVISEKTGKPRSKKRFGKSIANKAPAMLIEILRQKCKSLGLPNVVEINPADIKASQYNHLTGEYVKKSLSRRWNEMQDGEHLQRDLYSAFLLQHYDSMSKALDLDSLARDYPAFVQYHHREIERLHALPKTPSSMGIRRSIA

SEQ ID NO: 1817 - protein, 542 aa, unidentified
  REGION 1..542: note = Category: MG81 effectors
  REGION 1..542: note = Description: MG81-95 effector
  source 1..542: note = uncultivated organism sequence
MATTDKKDKDKEKLRAYKFRLDPNQAQTIALYQAAGAARYTYNMLTAYNLEVNRLRDDYWKKRHDEGISDADIKKELNALTKEDKRYKQLKYGVFGTQYLTPEKKRHEQAEHRIENGEDPSVVWNQETERSANPWLHTANQRVLVSGLQNASDAWDNFWASRTGKRAGRLVGTPRFKKKGISRDSFTVPAAETMGAYGTAYLRGEAAYQQGKRTITDYRHVRLSYLGVIRTYDSTKPLVKAVAAGAEIRSYTVSRNADRWYVSFLVKFSEPIRRSATKRARAAGAVGVDLGVKYLASLSDSEAPQRFPNLKFAEGLPSLENPRWSEASSRRLHKLQRALARSQKGSNRRSRLVKQIARLHHMTALRRESNLHQLTKKLSTGYTMVGLEDLNVSGMTASAKGTVENPGKNVAQKSGLNRVVLDAAFGVFRYQLEYKTAWYGSTLEKIDRYFASSQTCSECGRKAKTKLTLRDRVFDCAYCGNMMDRDFNAAVNICREAQRLFNKKLASENGESLNGRGSRGALRGAETVEASRPPASHRRGSP

SEQ ID NO: 1818 - protein, 512 aa, unidentified
  REGION 1..512: note = Category: MG81 effectors
  REGION 1..512: note = Description: MG81-96 effector
  source 1..512: note = uncultivated organism sequence
MKKSNTDTCCLTLPLKLEKWQEDRLAKRFEIARQLYNTLVHAELKRLAQVKQTAEYRENERKIRALDWNDPGDQAKLKGLYKERRKSLKTAGFTDYSFTTDMGKYYKHFRDNIGSSVAVHGIAPQVWAAFDKLLFKKGGKKVHYKKPGEVNSVQGYSRTGKSGGTEIMFRGPYIEWKGLKLPLKLSPDNAYETDMLQRRVKLVRLVRRPGKRRDRWYAQLVLEAKPAIKADPVTGKAVHPIGSGPVGLDIGPQTLAYSAAGAAGLVELADRVQNIEQEKRFLQRKMDRSRRAANPDNYAEDGTIRRGVKLTHNKSKRYRRSQQELKYLQRRQAEIRKLQHIQLANHLLSLGDHFYVEKMEWSSLTHRTKKTVISEKTGKPRSKKRFGKSIANKAPAMLIEILRQKCKSLGLPNVVEINPADIKASQYNHLTGEYVKKSLSRRWNDMQDGEHLQRDLYSAFLLQHYDSCSKTLDHDSIVRDYPAFVQYHHQEIERLHALPKTPASMGIRRSIA

SEQ ID NO: 1819 - protein, 534 aa, unidentified
  REGION 1..534: note = Category: MG81 effectors
  REGION 1..534: note = Description: MG81-97 effector
  source 1..534: note = uncultivated organism sequence
MGWKSKGRGGKRVKRSSTDTCCLTLPLKLEKWQSDRLEKRFEIGRQIYNTIVHAELKKLRKLERTQQYQEIEQKLENAKQEETKELWKKKRQLLDQNGLSENHFKADMKHYYPHFKDNIASSVAVHGIASQAWTAFEKVLLSKDGKMVHFKKKGELSSLRGYSQAGKSGGIEIIFRGSYVEWKGLKLPLKLSPDNDYETEMLSKRVKYVRILRKDGKTKTHWYAQLALEGKPAVKRDSISGAPKHPVGHGVVGIDIGTRTLAYSTDKEVNLLELADRVQNIEQEKRRLQRKMDRSRRAMNPGNYKPDGSIKQGVKLTWNNSKRYKRIQHQYAMIQHHQADIRKQQHNELANYLLTLGDCFFVENMSYCDLAHRANKTEISEKTGRYKRKKRFGKSIANKAPAMLITMLKQKCQSRGLEGVKEVDTHVCASQYNHQTDTCIKKALENRWNIMPDGERIQRDLYSAFLLQHCRRDLPEYNRKELQKEFGEELYRVFDREALQRDYPQFVAYHHMTIQRLSELPHTIPSMGIRRIIS

SEQ ID NO: 1820 - protein, 538 aa, unidentified
  REGION 1..538: note = Category: MG81 effectors
  REGION 1..538: note = Description: MG81-98 effector
  source 1..538: note = uncultivated organism sequence
MNNEEKEKEGATCCLTLPLKLEKWQSDHLEKRFEIARQLYNTLVHAELKKKCQVERMPEYQEIMKMIDAASNQKEKWALEKKRKAFLEENGFSRNAFKADMEKYYKHFNDNIGANVALHGITAQVWIAFDKVFVDNYKQKGKVHFKKPGELCSVQGYSQKKSGGKEIMFREDRIIWNQQGNRDRKKVKREFLLKLSPDNPYEAEMLKRHVKFVRILRKDGKTKPHWYAQLVLEGKPAVKRDPASGAPKHPVGHGVVGIDIGTRTLAYSTDKEVNLLELADRVQNIEQEKRRLQRKMDRSRRATNPENYNPDGTFKRGVKLTRNKSKRYRRIQHQLAMIQHHQADIRKQQHNELANYLLTLGDCFFVENMSYCDLVHRANKTEISEKTGRYKRKKRFGKSIANKAPAMLITMLKQKCQSRGLEGVKEVDTHVRASQYNHQTDTCIEKALENRWNVMPDGERIQRDLYSAFLLQHCKQGLPEYNRKELKKEFGEELYRVFDREALQRDYPQFVAYHHMTIQRLSELPHTIPSMGIRRIIS

SEQ ID NO: 1821 - protein, 550 aa, unidentified
  REGION 1..550: note = Category: MG81 effectors
  REGION 1..550: note = Description: MG81-99 effector
  source 1..550: note = uncultivated organism sequence
MGWKSKGRGGTLVDNEEKKEDGATCCLTLPLKLEKWQSDHLEKRFEIARQLYNTLVHAELKKKCQVERMPEYQEIMKMIDTASNQKEKWALEKKRKAFLEENGFSRNAFKADMEKYYKHFNDNIGANVALHGITAQVWIAFDKVFVDNYKQKGKVHFKKPGELCSVQGYSQKKSGGKEIMFREDRIIWNQQGNRDRKKVKREFLLKLSPDNPYEAEMLKRHVKFVRILRKDGKTKPHWYAQLVLEGKPAVKRDPASGAPKHPIGHGVVGIDIGTRTLAYSTDKEVNLLELADRVQNIEQEKRRLQRKMDRSRRATNPENYNPDGTFKRGVKLTRNKSKRYRRIQHQLAMIQHHQADIRKQQHNELANYLLTLGDCFFVENMSYCDLVHRANKTEISEKTGRYKRKKRFGKSIANKAPAMLITMLKQKCQSRGLKGVKEVDTHVRASQYNHQTDTCIEKALENRWNVMPDGERIQRDLYSAFLLQHCKQGLPEYNRKELKKEFGEELYRVFDREALQRDYPQFVAYHHMTIQRLSELPHTIPSMGIRRIIS

SEQ ID NO: 1822 - protein, 357 aa, unidentified
  REGION 1..357: note = Category: MG81 effectors
  REGION 1..357: note = Description: MG81-100 effector
  source 1..357: note = uncultivated organism sequence
MNNEEKEKEGATCCLTLPLKLEKWQSDHLEKRFEIARQLYNTLVHAELKKKCQVERMPEYQEIMKMIDTASNQKEKWALEKKRKAFLEENGFSRNAFKADMEKYYKHFNDNIGANVALHGITAQVWIAFDKVFVDNYKQKGKVHFKKPGELCSVQGYSQKKSGGKEIMFREDRIIWNQQGNRDRKKVKREFLLKLSPNNPYEAEMLKRHVKFVRILRKDGKTKPHWYAQLVLEGKPAVKRDPISSAPKHPVGHGVVGIDIGTRTLAYSTDKEVNLLELADRVQNIEQEKRRLQRKMDRSRRAMNPENYNSDGTFKRGVKLTRNKSKRYRRIQHQLAMIQHHQADIRKQQHNELANFC

SEQ ID NO: 1823 - protein, 522 aa, unidentified
  REGION 1..522: note = Category: MG81 effectors
  REGION 1..522: note = Description: MG81-101 effector
  source 1..522: note = uncultivated organism sequence
MKKSSTDTCCLTLPLKLEKWQSDRLEKRFEIGRQIYNTVVRAELKKLHQLERTPQYREIEQKLKEAKQEEAKELWKKRTQLLSQSGFSEYGFKSDMKYYYQHFKENIGSSVAVHGIASQVWTAFEKVLFSKDGKMVHFKKKGELSSLRGYSQAGKSGGKEIIFRGNYIEWKELKLPLKLTPNNDYETEMLSKRVKYVRLLRQDGKTKPHWYAQLVLEGKPAIKRDPVSGAPKHHVGHGVVGLDIGTRTLAYSADDKVDLLELADRVQNIEQEKMLLQRKLDRSRRATNPENYKPDGTIKKGVKLTRNKSKRYRKIQHQLAMLQHRQADIRKRQHNELANYLLTLGDCFFVEDMDYRALTRKAKKTEISEKTGRYKRKKRFGKSIANKAPSMLIALLDQKCKSLNLEGVKKVDTAVKASQYNHQTDECKAKELKERWNIMPDGERIQRDLYSAFLLQHCKRGLPEYNRKELKKEFGEELYRVFDREALQRDYPQFVVYHHMTIQRLSALPKTIASMGIRRSIS

SEQ ID NO: 1824 - protein, 548 aa, unidentified
  REGION 1..548: note = Category: MG81 effectors
  REGION 1..548: note = Description: MG81-102 effector
  source 1..548: note = uncultivated organism sequence
MEWKSTGRGGTLVDNEEKKEDGATCCLTLPLKLEKWQSDHLEKRFEIARQLYNTLVHAELKRIHRIERMPEYREIERQIEATTDKKEKWALKNQKKQFLRKNGINRNTFTTDMKRLYKHFNDNIGSNVAQHGIVSQVLTAFEKVYIENQSGEVHFKKPGDLRSVQGYSQKKSGGVEIMFREGKIIWNQQGNNDRKGVAREFPLKLSPDNSYEAEMLKKHVKFVRILRNEGKTKPHWYAQLVLEGKPAIKRDPASGAPKHPVGHGVVGIDIGTRTLAYSTDSKVDLIELADRVQNTEQEKMLLQRKLDRSRRATNPENYKPDGTIKKGVKLTRNKSKRYRKIQHQLAMLQHRQADIRKRQHNELANYLLTLGDCFFVEDMDYRALTRKAKKTEISEKTGRYKRKKRFGKSIANKAPSMLIALLDQKCKSLNLEGVKKVDTAVKASQYNHQTDECKAKKLKERWNIMPDGERIQRDLYSAFLLQHCRRDLPEYNRKKLQEAFGNELYRVFDREALQRDYPKFVEYHRETIQRLSALPKTIASMGIRRIIS

SEQ ID NO: 1825 - protein, 511 aa, unidentified
  REGION 1..511: note = Category: MG81 effectors
  REGION 1..511: note = Description: MG81-103 effector
  source 1..511: note = uncultivated organism sequence
MAKCSTDTCCLTLPLRLEKWHEDRLAKRFEIARQIYNTMVRAELKKLRAMEQSEPYKANQEKIQALDWKTQADKQALKALYKERDKLLRDGGFSEYGFKSDIKNYYKHFNNNIGSSVAVHGIAPQVWAAFEKMLFKKEGKKVHFKKKGDIRSLRGYSVTRKSGGVEIIFRETYIEWKGLKLPLKLSPDNIYETQMLSYRVKYVHLLRKPGKRKDRWYAQLSLEGKPVIKYNPKTGEVRHPIGKGAVGLDIGPQTLAYSAATGADLVELANQVQNVEQEKRRLQRKLDRSRRATNPGNYADDGTIRRGIALTHNKSKRYLRTQQELKYLQHQQAEIRKRQHTELANHLLSLGDCFYVEKMVWTSLTHRAKETEISEKTGKIKRKKRFGKSVANKAPATLIGILQRKSAALGIPGVIEVPTSVKASQYNHQSGTYTPKPLSQRWNNMPDGERIQRDLYSAFLLQHYDPQTNTFDANSLHQDYPQFVQYHHDAVLRLYAMPKTPSSMGIKRSLR

SEQ ID NO: 1826 - protein, 512 aa, unidentified
  REGION 1..512: note = Category: MG81 effectors
  REGION 1..512: note = Description: MG81-104 effector
  source 1..512: note = uncultivated organism sequence
MKKSSTDTCCLTLPLKLEKWQEDRLAKRFEIARQLYNTLVHAELKRLVQIKRTAEYLENEQKIRALDRNNPADRAKLQELYKEQRKSLKTAGFTDYSFTTDMGKYYKHFRDNIGSSVAVHGIAPQVWAAFDKVLFKKGGKKVHYKRPGEVNSVQGYSRTGKSGGREIMFRGAYIEWKGLKLPLKLSPDNAYETDMLQRRVKLVRLVRRPGKRRDRWYAQLVLEGKPAIKADPVTGKAVHPIGSGPIGLDIGPQTLAYSAAGAAGLVELADRVQNIEQEKRRLQRKMDRSRRAANPDNYAEDGTIRRGVKLTHNKSKRYRRSQQELKYLQHRQAEIRKLQHIQFANHLLSLGDHFYVEKMEWSSLTHRAKETVISEKTGKPRSKRRFGKSIANKAPAMLIEILRQKCKSLGLSDVVEINPADIKASQYNHLTGEYVKKSLSRRWNDMQDGEHLQRDLYSAFLLQHYDSCSKTLDHDSIVRDYPAFVQYHHREIERLHALPKTPSSMGIRRSIA

SEQ ID NO: 1827 - protein, 311 aa, unidentified
  REGION 1..311: note = Category: MG81 effectors
  REGION 1..311: note = Description: MG81-105 effector
  source 1..311: note = uncultivated organism sequence
MILLAKNNNNTDTCVLTLPLRVEKWQEDCLLKRFEAARRIYNSLLNFELKKLRQLERTVEYRQIQSVISSAYRSNTKDSPECKDAFKRREKLISANGISEYGFKSDVKFFYKHFDGLIGSNVAVHCIAVQLWAAFDKYLRGSGKEIHFKRLGDISSLKGYSVKGKSGGCEIIFRGQYIEWTRKKKKLLLPLKIDPDNEYEREMLSRRVKYVRIIKKPGKNRLRWYAQLTLEGKPALKYSAETGKPIHSVGKGNVGIDIGPRPLHTLPIKKLLCLNLLTESPISSIKKRSFSASWIAAAAQRIRTTTNRTAQ

SEQ ID NO: 1828 - protein, 511 aa, unidentified
  REGION 1..511: note = Category: MG81 effectors
  REGION 1..511: note = Description: MG81-106 effector
  source 1..511: note = uncultivated organism sequence
MAKCSTDTCCLTLPLRLEKWQEDRLAKRFEIARQIYNTMVRAELKKLRAMEQSEPYKANQEKIQALDRKTQTDKQALKALYKERDKLLRDGGFSEYGFKSDIKNYYKHFNNNIGSNVAFHGIAPQVWAAFEKMLFKKEGKKVHFKKKGDIHSLRGYSATGKSGGVEIIFRETYIEWKGLKLPLKLSPDNIYETQMLSYRVKYVRLLRKPGKRKDRWYAQLSLEGKPVIKYNPKTGEVRHPIGKGAVGLDIGPQTLAYSAATGADLVELANQVQNVEQEKRRLQRKLDRSRRATNPGNYADDGTIRRGIALTHNKSKRYLRTQQELKYLQHQQAEIRKRQHTELANHLLSLGDCFYVEKMVWTSLTHRAKETEISEKTGKIKRKKRFGKSVANKAPATLIGILQRKSAALGIPGVIEVPTSVKASQYNHQSGTYTHKPLSQRWNNMPDGERIQRDLYSAFLLQHYDPQTNTFDANSLHQDYPQFVQYHHDAVLRLYAMPKAPSSMGIKRSLR

SEQ ID NO: 1829 - protein, 527 aa, unidentified
  REGION 1..527: note = Category: MG81 effectors
  REGION 1..527: note = Description: MG81-107 effector
  source 1..527: note = uncultivated organism sequence
MAKNNNNNDTDTCVLTLPLRVEKWQEDCLLKRFEAARRIYNSLLNFELKKLRQLERTVEYRQIQSVISSAYRSNTKDSPECKDAFKRREKLISANGISENGFKSDVKFFYKHFDGLIGSSVAVHCIAVQLWAAFDKYLSGSGKEIHFKRLGDISSLKGYSVKGKSGGCEIIFRGQYVEWTRKKKKLLLPLKIDPDNEYEREMLSRRVKYVRIIKKPGKNRLRWYAQLTLEGKPALKYSAETGKPIHSVGKGNVGIDIGPQTVAYASDKEVALLELADRVTNIEHQKKKLQRKLDRSRRATNPDNYKPDGTIKRGVKLTRNKSKRYLKLQSKLAYIQHRQAEIRKLQHTCLANHMLTLGDCFFVEKMNWPGLAHRAKETSISEKTGRYKRKKRFGKSLANKAPAMFISILKRKCETLGLPGVVEVDTFRLRASQYNHLSDTYEKKSLSERWNYMPISDGSDSSKTKRIQRDLYSAFLLQHTIPQPCSFDKEALRIDYPNFVIMHDAEIHRLESLPKTITSMGVRRSHS

SEQ ID NO: 1830 - protein, 536 aa, unidentified
  REGION 1..536: note = Category: MG81 effectors
  REGION 1..536: note = Description: MG81-108 effector
  source 1..536: note = uncultivated organism sequence
MDADEYKKLLKKFHKLSDRHILVAEADMSYPDVQKVVNLSDRIRKAGNELVSLMKKNYEQLMRTKKYRKLLQLYGSTEDKKKRKTYAGQLNEMQEQYNVTWDFCRASMIPIGKKYGIDAIFALTKAEDVWRGVEKCLYGNGRMLHFSKYGDFPCIRAKQINRGIPMSVKNDELKFKLGKLVFGIQVKDRFQTDEVNAVLDYLAQPEVIDNKAVKTLQDEACCISTYRPCYATLVPKFIRGKYRVYLHLVIEGKAKPKYDSSGNPRHKYGRGVVGADIGTQTVAYTSDTETGLKNLSERGNSIQKSERLERLYYRAMDRSRRATNPKNYNADGTIKKGKKKWTYSRHYKKLKAKHAELCCINATNRQLAINEDVNHLRCLGDTFVTEPKNAARLMKRAKETTVNNKGKINRKKRFGKSVKNRCPGGFQAAVENKFKTSGGTYIEVPNNYRASQYDHTADDYIKKKLSDRMYKLADGTLVQRDWYSSFLLYCYNYRTNDIDKKKCAAEFKKCYSMEKDLIEWIKENKIKVLNSGIKIA

SEQ ID NO: 1831 - protein, 334 aa, unidentified
  REGION 1..334: note = Category: MG81 effectors
  REGION 1..334: note = Description: MG81-109 effector
  source 1..334: note = uncultivated organism sequence
MLKRHVKFVRILRKDGKTKPHWYAQLVLEGKPAVKRDPASGAPKHPIGHGVVGIDIGTRTLAYSTDKEVNLLELADRVQNIEQEKRRLQRKMDRSRRATNPENYNPDGTFKRGVKLTRNKSKRYRRIQHQLAMIQHHQADIRKQQHNELANYLLTLGDCFFVENMSYCDLVHRANKTEISEKTGRYKRKKRFGKSIANKAPAMLITMLKQKCQSRGLKGVKEVDTHVRASQYNHQTDTCIEKALENRWNVMPDGERIQRDLYSAFLLQHCKQGLPEYNRKELKKEFGEELYRVFDREALQRDYPQFVAYHHMTIQRLSELPHTIPSMGIRRIIS

SEQ ID NO: 1832 - protein, 511 aa, unidentified
  REGION 1..511: note = Category: MG81 effectors
  REGION 1..511: note = Description: MG81-110 effector
  source 1..511: note = uncultivated organism sequence
MAKCSTDTCCLTLPLRLEKWQEDRLAKRFEIARQIYNTMVRAELKKLRAMEQSEPYKANQEKIQALDWKTQTDKQALKALYKERDKLLRDGGFSEYGFKSDIKNYYKHFNNNIGSNVAFHGIAPQVWAAFEKMLFKKEGKKVHFKKKGDIHSLRGYSAAGKSGGVEIIFRETYIEWKGLKLPLKLSPDNIYETQMLSYRVKYVRLLRKPGKRKDRWYAQLSLEGKPVIKYNPKTGEVRHPIGKGAVGLDIGPQTLAYSAATGADLVELANQVQNVEQEKRRLQRKLDRSRRATNPGNYADDGTIRRGIALTHNKSKRYLRTQQELKYLQHQQAEIRKRQHTELANHLLSLGDCFYVEKMVWTSLTHRAKETEISEKTGKIKRKKRFGKSVANKAPATLIGILQRKSAALGIPGVIEVPTSVKASQYNHQSGTYTPKPLSQRWNNMPDGERIQRDLYSAFLLQHYDPQTNTFDANSLHQDYPQFVQYHHDAVLRLYAMPKAPSSMGIKRSLR

SEQ ID NO: 1833 - protein, 566 aa, unidentified
  REGION 1..566: note = Category: MG81 effectors
  REGION 1..566: note = Description: MG81-111 effector
  source 1..566: note = uncultivated organism sequence
MGWKSKGRGGTLVDNEEKKEDGATCCLTLPLKLEKWQSDHLEKRFEIARQLYNTLVHAELKRIHRIERMPEYREIERLIEATTDKKEKWALKNQKKQFLRKNGINRNTFTTDMKRLYKHFNDNIGSNVAQHGIVSQVLTAFEKVYIENQSGEVHFKKPGDLRSVQGYSQKESGGKEIMFRNGKIIWTQQENDDRKKSPKYQQRKKRQNYKGVKGIAREFPVVFSKNNPYEAEMLTKHVKFVRILRKDGKTKPHWYAQLVLEGKPAIKRDPASGAPKHPVGHGVVGIDIGTRTLAYSADSKVDLIELADRVQNIEQEKLLLQRKLDRSRRATNPENYKPDGTIKKGVKLTRNKSKRYRKIQHQLAMLQHRQADIRKRQHNELANYLLTLGDCFFVEDMDYRALTRKAKKTEISEKTGRYKRKKRFGKSIANKAPSMLIALLDQKCKSLNLEGVKKVDTAVKASQYNHQTDECKAKELKERWNIMPDGERIQRDLYSAFLLQHCKRGLPEYNRKKLQETFGNELYRVFDREALQRDYPKFVEYHRKTIQRLSALPKTIASMGIRRIIS

SEQ ID NO: 1834 - protein, 538 aa, unidentified
  REGION 1..538: note = Category: MG81 effectors
  REGION 1..538: note = Description: MG81-112 effector
  source 1..538: note = uncultivated organism sequence
MNNEEKEKEGATCCLTLPLKLEKWQSDHLEKRFEIARQLYNTLVHAELKKKCQVERMPEYQEIMKMIDTASNQKEKWALEKKRKAFLEENGFSRNAFKADMEKYYKHFNDNIGANVALHGITAQVWIAFDKVFVDNYKQKGKVHFKKPGELCSVQGYSQKKSGGKEIMFREDRIIWNQQGNRDRKKVKREFLLKLSPNNPYEAEMLKRHVKFVRILRKDGKTKPHWYAQLVLEGKPAVKRDPISSAPKHPVGHGVVGIDIGTRTLAYSTDKEVNLLELADHVQNIEQEKRRLQRKMDRSRRATNPENYNPDGTFKRGVKLTRNKSKRYRRIQHQLAMIQHHQADIRKQQHNELANYLLTLGDCFFVENMSYCDLVHRANKTEISEKTGRYKRKKRFGKSIANKAPAMLITMLKQKCQSRGLKGVKEVDTHVRASQYNHQTDTCIEKALENRWNVMPDGERIQRDLYSAFLLQHCKQGLPEYNRKELKKEFGEELYRVFDREALQRDYPQFVAYHHMTIQRLSELPHTIPSMGIRRIIS

SEQ ID NO: 1835 - protein, 534 aa, unidentified
  REGION 1..534: note = Category: MG81 effectors
  REGION 1..534: note = Description: MG81-113 effector
  source 1..534: note = uncultivated organism sequence
MGWKSKGRGGKRVKRSSTDTCCLTLPLKLEKWQSDRLEKRFEIGRQIYNTIVHAELKKLRKLERTQQYQEIEQKLENAKQEETKELWKKKRQLLDQNGLSENHFKADMKHYYPHFKDNIASSVAVHGIASQAWTAFEKVLLSKDGKMVHFKKKGELSSLRGYSQTGKSGGIEIIFRGSYVEWKGLKLPLKLSPDNDYETEMLSKRVKYVRILRQDGKTKPHWYAQLVLEGKPAVKRDPISGAPKHPIGRGVVGIDIGTRTLAYSADSKVDLIELADRVQNIEQEKLLLQRKLDRSRRATNPENYKPDGTIKKGVKLTRNKSKRYRRIQHQLAMIQHHQADIRKQQHNELANYLLTLGDCFFVENMSYCDLAHRANKTEISEKTGRYKRKKRFGKSIANKAPAMLITMLKQKCQSRGLKGVKEVDTHVRASQYNHQTDTCIEKALENRWNVMPDGERIQRDLYSAFLLQHCKQGLPEYNRKELKKEFGEELYRVFDREALQRDYPQFVAYHHMTIQRLSELPHTIPSMGIRRIIS

SEQ ID NO: 1836 - protein, 534 aa, unidentified
  REGION 1..534: note = Category: MG81 effectors
  REGION 1..534: note = Description: MG81-114 effector
  source 1..534: note = uncultivated organism sequence
MGWKSKGRGGTLVKKSSTDTCCLTLPLKLEKWQSDRLEKRFEIGRQIYNTVVRAELKKLQQVERTPQYREIEQKLKEAKQEEAKELWKTRTQLLSKSGFSEYGFKSDMKYYYQHFKENIGSSVAVHGIASQVWTAFEKVLFSKDGKMVHFKKKGELSSLRGYSQAGKSGGIEIIFRGSYVEWKGLKLPLKLSPDNDYETEMLSKRVKYVRILRKEGKTKPHWYAQLVLEGKPAIKRDPASGAPKHPVGHGVVGIDIGTRTLAYSADSKVDLIELADRVQNIEQEKMLLQRKLDRSRRATNPENYKPDGTIKKGVKLTRNKSKRYRKIQHQLAMLQHRQADIRKRQHNELANYLLTLGDCFFVEDMDYRALTRKAKKTEISEKTGRYKRKKRFGKSIANKAPSMLIALLDQKCKSLNLEGVKKVDTAVKASQYNHQTDECKAKELKERWNIMPDGERIQRDLYSAFLLQHCRRDLPEYNRKKLQETFGNELYRVFDREALQRDYPQFVAYHHMTIQRLSALPKTIASMGIRRSIS

SEQ ID NO: 1837 - protein, 213 aa, unidentified
  REGION 1..213: note = Category: MG81 effectors
  REGION 1..213: note = Description: MG81-115 effector
  source 1..213: note = uncultivated organism sequence
MKLTRNKSKRYLKLQSKLAYIQHRQAEIRKLQHTCLANHMLTLGDRFFVEKMNWPGLAHRAKETSISEKTGRYKRKKRFGKSLANKAPAMFISILKRKCETLGLPGVVEVDTYSLKASQYNHLSDTYEKKSLSERWNYMPISDGSDSSKTKRIQRDLYSAFLLQHTIPQPCSFDKKALRIDYPNFVTMHDAEIHRLESLPKTITSMGVRRSHS

SEQ ID NO: 1838 - protein, 522 aa, unidentified
  REGION 1..522: note = Category: MG81 effectors
  REGION 1..522: note = Description: MG81-116 effector
  source 1..522: note = uncultivated organism sequence
MKRSSTDTCCLTLPLKLEKWQSDRLEKRFEIGRQIYNTIVHAELKKLRKLERTQQYQEIEQKLENAKQEETKELWKKKRQLLDQNGLSEDHFKADMKYYYPHFKDNIASNVAVHGIASQAWTAFEKVLFSKDGKMVHFKKKGELSSLRGYSRAGKSGGVEIIFRGSYVEWKGLKLPLKLSPDNDYETEMLSKRVKYVRILRKDGKTKTHWYAQLVLEGKPAVKRDPASGAPKHPIGHGVVGIDIGTRTLAYSTDKEVNLLELADHVQNIEQEKRRLQRKMDRSRRATNPENYNPDGTFKRGVKLTRNKSKRYRRIQHQLAMIQHHQADIRKQQHNELANYLLTLGDCFFVENMSYCDLVHRANKTEISEKTGRYKRKKRFGKSIANKAPAMLITMLKQKCQSRGLEGVKEVDTHVRASQYNHQTDTCIEKALENRWNVMPDGERIQRDLYSAFLLQHCKQGLPEYNRKELKKEFGEELYRVFDREALQRDYPQFVAYHHMTIQRLSELPHTIPSMGIRRIIS

SEQ ID NO: 1839 - protein, 538 aa, unidentified
  REGION 1..538: note = Category: MG81 effectors
  REGION 1..538: note = Description: MG81-117 effector
  source 1..538: note = uncultivated organism sequence
MNNEEKEKEGATCCLTLPLKLEKWQSDHLEKRFEIARQLYNTLVHAELKKKCQVERMPEYQEIMKMIDTASNQKEKWALEKKRKAFLEENGFSRNAFKADMEKYYKHFNDNIGANVALHGITAQVWIAFDKVFVDNYKQKGKVHFKKPGELCSVQGYSQKKSGGKEIMFREDRIIWNQQGNRDRKKVKGEFLLKLSPNNPYEAEMLKRHVKFVRILRKDGKTKPHWYAQLVLEGKPAVKRDPISSAPKHPVGHGVVGIDIGTRTLAYSTDKEVNLLELADHVQNIEQEKRRLQRKMDRSRRATNPENYNPDGTFKRGVKLTRNKSKRYRRIQHQLAMIQHHQADIRKQQHNELANYLLTLGDCFFVENMSYCDLVHRANKTEISEKTGRYKRKKRFGKSIANKAPAMLITMLKQKCQSRGLKGVKEVDTHVRASQYNHQTDTCIEKALENRWNVMPDGERIQRDLYSAFLLQHCKQGLPEYNRKELKKEFGEELYRVFDREALQRDYPQFVAYHHMTIQRLSELPHTIPSMGIRRIIS

SEQ ID NO: 1840 - protein, 388 aa, unidentified
  REGION 1..388: note = Category: MG81 effectors
  REGION 1..388: note = Description: MG81-118 effector
  source 1..388: note = uncultivated organism sequence
MVHFKKKGELSSLRGYSQTGKSGGIEIIFRGSYVEWKGLKLPLKLSPDNDYETEMLSKRVKYVRILRQDGKTKPHWYAQLVLEGKPAVKRDPISGAPKHPIGHGVVGIDIGTRTLAYSADSKVDLIELADRVQNIEQEKLLLQRKLDRSRRATNPGNYNPDGTIKKGVKLTRNKSKRYRKIQHQLAMLQHRQADIRKRQHNELANYLLTLGDCFFVEDMDYRALTRKAKKTEISEKTGRYKRKKRFGKSIANKAPSMLIALLDQKCESLNLEGVKKVDTAVKASQYNHQTDECKAKELKERWNIMPDGERIQRDLYSAFLLQHCRRDLPEYNRKELQKEFGEELYRVFDREALQRDYPQFVAYHHMTIQRLSELPHTIPSMGIRRIIS

SEQ ID NO: 1841 - protein, 538 aa, unidentified
  REGION 1..538: note = Category: MG81 effectors
  REGION 1..538: note = Description: MG81-119 effector
  source 1..538: note = uncultivated organism sequence
MDNEEKEKDGATCCLTLPLKLEKWQSDHLEKRFEIARQLYNTLVHAELKKKCQVERMPEYQEIMKMIDAASNQKEKWALEKKRKAFLEENGFNRNAFKADMEKYYKHFNDNIGANVALHGITAQVWIAFDKVFVDNYKQKGKVHFKKPGELCSVQGYSQKKSGGKEIMFREDRIIWNQQGNRDRKKVKREFLLKLSPDNPYEAEMLKRHVKFVRILRKDGKTKPHWYAQLVLEGKPAVKRDPASGAPKHPIGHGVVGIDIGTRTLAYSTDKEVNLLELADHVQNIEQEKRRLQRKMDRSRRATNPENYNPDGTFKRGVKLTRNKSKRYRRIQHQLAMIQHHQADIRKQQHNELANYLLTLGDCFFVENMSYCDLVHRANKTEISEKTGRYKRKKRFGKSIANKAPAMLITMLKQKCQSRGLKGVKEVDTHVRASQYNHQTDTCIEKALENRWNVMPDGERIQRDLYSAFLLQHCKQGLPEYNRKELKKEFGEELYRVFDREALQRDYPQFVAYHHMTIQRLSELPHTIPSMGIRRIIS

SEQ ID NO: 1842 - protein, 567 aa, unidentified
  REGION 1..567: note = Category: MG81 effectors
  REGION 1..567: note = Description: MG81-120 effector
  source 1..567: note = uncultivated organism sequence
MSNLLFLLENEEKMRYNGVEKQRKGEGTRVNNEEKEKDGATCCLTLPLKLEKWQSDHLEKRFEIARQLYNTLVHAELKKKCQVERMPEYQEIMKMIDAASNQKEKWALEKKRKAFLEENGFSRNAFKADMEKYYKHFNDNIGANVALHGITAQVWIAFDKVFVDNYKQKGKVHFKKPGELCSVQGYSQKKSGGKEIMFREDRIIWNQQGNRDRKKVKREFLLKLSPDNPYEAEMLKRHVKFVRILRKDGKTKPHWYAQLVLEGKPAVKRDPASGAPKHPIGHGVVGIDIGTRTLAYSTDKEVNLLELADHVQNIEQEKRRLQRKMDRSRRATNPENYNPDGTFKRGVKLTRNKSKRYRRIQHQLAMIQHHQADIRKQQHNELANYLLTLGDCFFVENMSYCDLVHRANKTEISEKTGRYKRKKRFGKSIANKAPAMLITMLKQKCQSRGLEGVKEVDTHVRASQYNHQTDTCIEKALENRWNVMPDGERIQRDLYSAFLLQHCKQGLPEYNRKELKKEFGEELYRVFDREALQRDYPQFVAYHHMTIQRLSELPHTIPSMGIRRIIS

SEQ ID NO: 1843 - protein, 538 aa, unidentified
  REGION 1..538: note = Category: MG81 effectors
  REGION 1..538: note = Description: MG81-121 effector
  source 1..538: note = uncultivated organism sequence
MNNEEKEKEGATCCLTLPLKLEKWQSDHLEKRFEIARQLYNTLVHAELKKKCQVERMPEYQEIMKMIDTASNQKEKWALEKKRKAFLEENGFSRNAFKADMEKYYKHFNDNIGANVALHGITAQVWIAFDKVFVDNYKQKGKVHFKKPGELCSVQGYSQKKSGGKEIMFREDRIIWNQQGNRDRKKVKREFLLKLSPDNPYEAEMLKRHVKFVRILRKDGKTKPHWYAQLVLEGKPAVKRDPASGAPKHPIGHGVVGIDIGTRTLAYSTDKEVNLLELADRVQNIEQEKRRLQRKMDRSRRATNPENYNPDGTFKRGVKLTRNKSKRYRRIQHQLAMIQHHQADIRKQQHNELANYLLTLGDCFFVENMSYCDLVHRANKTEISEKTGRYKRKKRFGKSIANKAPAMLITMLKQKCQSRGLKGVKEVDTHVRASQYNHQTDTCIEKALENRWNVMPDGERIQRDLYSAFLLQHCKQGLPEYNRKELKKEFGEELYRVFDREALQRDYPQFVAYHHMTIQRLSELPHTIPSMGIRRIIS

SEQ ID NO: 1844 - protein, 550 aa, unidentified
  REGION 1..550: note = Category: MG81 effectors
  REGION 1..550: note = Description: MG81-122 effector
  source 1..550: note = uncultivated organism sequence
MGRKSTGRGGKRVNNEEKEKDGATCCLTLPLKLEKWQSDHLEKRFEIARQLYNTLVHAELKKKCQVVRMPEYQEIMKMIDAASNQKEKWALEKKRKAFLEENGFSRNAFKADMEKYYKHFNDNIGANVALHGITAQVWIAFDKVFVDNYKQKGKVHFKKPGELCSVQGYSQKKSGGKEIMFREDRIIWNQQGNRDRKKVKREFLLKLSPDNPYEAEMLKRHVKFVRILRKDGKTKPHWYAQLVLEGKPAVKRDPISSAPKHPVGHGVVGIDIGTRTLAYSTDKEVNLLELADRVQNIEQEKRRLQRKMDRSRRAMNPENYNSDGTFKRGVKLTRNKSKRYRRIQHQLAMIQHHQADIRKQQHNELANYLLTLGDCFFVENMSYCDLVHRANKTEISEKTGRYKRKKRFGKSIANKAPAMLITMLKQKCQSRGLEGVKEVDTHVRASQYNHQTDTCIEKALENRWNVMPDGERIQRDLYSAFLLQHCKQGLPEYNRKELKKEFGEELYRVFDREALQRDYPQFVAYHHMTIQRLSELPHTIPSMGIRRIIS

SEQ ID NO: 1845 - protein, 538 aa, unidentified
  REGION 1..538: note = Category: MG81 effectors
  REGION 1..538: note = Description: MG81-123 effector
  source 1..538: note = uncultivated organism sequence
MDNEEKEKDGATCCLTLPLKLEKWQSDHLEKRFEIARQLYNTLVHAELKKKCQVERMPEYQEIMKMIDAASNQKEKWALEKKRKAFLEENGFSRNAFKADMEKYYKHFNDNIGANVALHGITAQVWIAFDKVFVDNYKQKGKVHFKKPGELCSVQGYSQKKSGGKEIMFREDRIIWNQQGNRDRKKVKREFLLKLSPDNPYEAEMLKRHVKFVRILRKDGKTKPHWYAQLVLEGKPAVKRDPASGAPKHPIGHGVVGIDIGTRTLAYSTDSEVNLLELADRVQNIEQEKRRLQRKMDRSRRAMNPGNYKPDGSIKQGVKLTWNNSKRYKRIQHQYAMIQHHQADIRKQQHNELANYLLTLGDCFFVENMSYCDLAHRANKTEISEKTGRYKRKKRFGKSIANKAPAMLITMLKQKCQSRGLEGVKEVDTHVCASQYNHQTDTCIKKALENRWNIMPDGERIQRDLYSAFLLQHCRRDLPEYNRKELQKEFGEELYRVFDREALQRDYPQFVAYHHMTIQRLSELPHTIPSMGIRRIIS

SEQ ID NO: 1846 - protein, 427 aa, unidentified
  REGION 1..427: note = Category: MG81 effectors
  REGION 1..427: note = Description: MG81-124 effector
  source 1..427: note = uncultivated organism sequence
MKYYYQHFKENIGSSVAVHGIASQVWTAFEKVLFSKDGKMVHFKKKGELSSLRGYSQAGKSGGVEIIFRGSYVEWKGLKLPLKLSPDNDYETEMLSKRVKYVRILRQDGKTKPHWYAQLVLEGKPAIKRDPASGTPKHPIGHGVVGIDIGTRTLAYSADSKVDLIELADRVQNIEQEKMLLQRKLDRSRRATNPENYKPDGTIKKGVKLTRNKSKRYRKIQHQLAMLQHRQADIRKRQHNELANYLLTLGDCFFVEDMDYRALTRKAKKTEISEKTGRYKRKKRFGKSIANKAPSMLIALLDQKCKSLNLEGVKKVDTAVKASQYNHQTDECKAKELKERWNIMPDGERIQRDLYSAFLLQHCRRDLPEYNRKKLQETFGNELYRVFDREALQRDYPKFVEYHRETIQRLSALPKTIASMGIRRSIS

SEQ ID NO: 1847 - protein, 550 aa, unidentified
  REGION 1..550: note = Category: MG81 effectors
  REGION 1..550: note = Description: MG81-125 effector
  source 1..550: note = uncultivated organism sequence
MGWKSKGRGGTLVDNEEKKEDGATCCLTLPLKLEKWQSDHLEKRFEIARQLYNTLVHAELKKKCQVERMPEYQEIMKMIDTASNQKEKWALEKKRKAFLEENGFSRNAFKADMEKYYKHFNDNIGANVALHGITAQVWIAFDKVFVDNYKQKGKVHFKKPGELCSVQGYSQKKSGGKEIMFREDRIIWNQQGNRDRKKVKREFLLKLSPNNPYEAEMLKRHVKFVRILRKDGKTKPHWYAQLVLEGKPAVKRDPISSAPKHPVGHGVVGIDIGTRTLAYSTDKEVNLLELADRVQNIEQEKRRLQRKMDRSRRAMNPENYNPDGTFKRGVKLTRNKSKRYRRIQHQLAMIQHHQADIRKQQHNELANYLLTLGDCFFVENMSYCDLVHRANKTEISEKTGRYKRKKRFGKSIANKAPAMLITMLKQKCQSRGLEGVKEVDTHVRASQYNHQTDTCIEKALENRWNVMPDGERIQRDLYSAFLLQHCKQGLPEYNRKELKKEFGEELYRVFDREALQRDYPQFVAYHHMTIQRLSELPHTIPSMGIRRIIS

SEQ ID NO: 1848 - protein, 550 aa, unidentified
  REGION 1..550: note = Category: MG81 effectors
  REGION 1..550: note = Description: MG81-126 effector
  source 1..550: note = uncultivated organism sequence
MGWKSKGGGGTRVDNEEKEKDGATCCLTLPLKLEKWQSDHLEKRFEIARQLYNTLVHAELKKKCQVERMPEYQEIMKMIDTASNQKEKWALEKKRKAFLEENGFSRNAFKADMEKYYKHFNDNIGANVALHGITAQVWIAFDKVFVDNYKQKGKVHFKKPGELCSVQGYSQKKSGGKEIMFREDRIIWNQQGNRDRKKVKREFLLKLSPNNPYEAEMLKRHVKFVRILRKDGKTKPHWYAQLVLEGKPAVKRDPISSAPKHPVGHGVVGIDIGTRTLAYSTDKEVNLLELADRVQNIEQEKRRLQRKMDRSRRAMNPENYNSDGTFKRGVKLTRNKSKRYRRIQHQLAMIQHHQADIRKQQHNELANYLLTLGDCFFVENMSYCDLVHRANKTEISEKTGWYKRKKRFGKSIANKAPAMLITMLKQKCQSRGLEGVKEVDTHVRASQYNHQTDTCIEKALENRWNVMPDGERIQRDLYSAFLLQHCKQGLPEYNRKELKKEFGEELYRVFDREALQRDYPQFVAYHHMTIQRLSELPHTIPSMGIRRIIS

SEQ ID NO: 1849 - protein, 534 aa, unidentified
  REGION 1..534: note = Category: MG81 effectors
  REGION 1..534: note = Description: MG81-127 effector
  source 1..534: note = uncultivated organism sequence
MGWKSKGRGGKRVKRSSTDTCCLTLPLKLEKWQSDRLEKRFEIGRQIYNTIVHAELKKLRKLERTQQYQEIEQKLENAKQEETKELWKKKRQLLDQNGLSENHFKADMKHYYPHFKDNIASSVAVHGIASQAWTAFEKVLLSKDGKMVHFKKKGELSSLRGYSQTGKSGGIEIIFRGSYVEWKGLKLPLKLSPDNDYETEMLSKRVKYVRILRQDGKTKPHWYAQLVLEGKPAVKRDPISGAPKHPIGRGVVGIDIGTRTLAYSADSKVDLIELADRVQNIEQEKLLLQRKLDRSRRATNPENYKPDGTIKKGVKLTRNKSKRYRRIQHQLAMIQHHQADIRKQQHNELANYLLTLGDCFFVEDMDYRALTRKAKKTEISEKTGRYKRKKRFGKSIANKAPAMLITMLKQKCQSRGLKGVKEVDTHVRASQYNHQTDTCIEKALENRWNVMPDGERIQRDLYSAFLLQHCKQGLPEYNRKELKKEFGEELYRVFDREALQRDYPQFVAYHHMTIQRLSELPHTIPSMGIRRIIS

SEQ ID NO: 1850 - protein, 566 aa, unidentified
  REGION 1..566: note = Category: MG81 effectors
  REGION 1..566: note = Description: MG81-128 effector
  source 1..566: note = uncultivated organism sequence
MGWKSKGRGGTRVNNEEKEKDGATCCLTLPLKLEKWQSDHLEKRFEIARQLYNTLVHAELKRIHRIERMPEYREIERQIEATTDKKEKWALKNQKKQFLRKNGINRNTFTTDMKRLYKHFNDNIGSNVAQHGIVSQVLTAFEKVYIENQSGEVHFKKPGDLRSVQGYSQKESGGKEIMFRNGKIIWTQQENDDRKKSPKYQQRKKRQNYKGVKGIAREFPVVFSKNNPYEAEMLTKHVKFVRILRKDGKTKPHWYAQLVLEGTPVAKYDPISGAPKHPVGHGVVGIDIGTRTLAYSTDKEVNLLELADRVQNIEQEKRRLQRKMDRSRRAMNPENYNSDGTFKRGVKLTRNKSKRYRRIQHQLAMIQHHQADIRKQQHNELANYLLTLGDCFFVENMSYCDLVHRANKTEISEKTGRYKRKKRFGKSIANKAPAMLITMLKQKCQSRGLKGVKEVDTHVRASQYNHQTDTCIEKALENRWNVMPDGERIQRDLYSAFLLQHCKQGLPEYNRKELKKEFGEELYRVFDREALQRDYPQFVAYHHMTIQRLSELPHTIPSMGIRRIIS

SEQ ID NO: 1851 - protein, 534 aa, unidentified
  REGION 1..534: note = Category: MG81 effectors
  REGION 1..534: note = Description: MG81-129 effector
  source 1..534: note = uncultivated organism sequence
MGWKSTGRGGKRVKRSSTDTCCLTLPLKLEKWQSDRLEKRFEIGRQIYNTIVHAELKKLRKLERTQQYQEIEQKLENAKQEETKELWKKKRQLLDQNGLSENHFKADMKHYYPHFKDNIASSVAVHGIASQAWTAFEKVLLSKDGKMVHFKKKGELSSLRGYSQAGKSGGIEIIFRGSYVEWKGLKLPLQLSPNNEYETEMLSKRVKYVRILRKDGKTKTHWYAQLALEGKPAVKRDSISGAPKHPVGHGVVGIDIGTRTLAYSTDSEVNLLELADRVQNIEQEKRRLQRKMDRSRRAMNPGNYKPDGSIKQGVKLTWNNSKRYKRIQHQYAMIQHHQADIRKQQHNELANYLLTLGDCFFVEDMDYRALTRKAKKTEISEKTGRYKRKKRFGKSIANKAPSMLIALLDQKCKSLNLEGVKMVDTAVKASQYNHQTDECKAKELKERWNIMPDGERIQRDLYSAFLLQHCRRDLPEYNRKKLQEAFGNELYRVFDREALQRDYPKFVEYHRKTIQRLSALPKTIASMGIRRIIS

SEQ ID NO: 1852 - protein, 550 aa, unidentified
  REGION 1..550: note = Category: MG81 effectors
  REGION 1..550: note = Description: MG81-130 effector
  source 1..550: note = uncultivated organism sequence
MGWKSKGRGGTRVDNEEKEKDGATCCLTLPLKLEKWQSDHLEKRFEIARQLYNTLVHAELKKKCQVVRMPEYQEIMKMIDAASNQKEKWALEKKRKAFLEENGFSRNAFKADMEKYYKHFNDNIGANVALHGITAQVWIAFDKVFVDNYKQKGKVHFKKPGELCSVQGYSQKKSGGKEIMFREDRIIWNQQGNRDRKKVKREFLLKLSPDNPYEAEMLKRHVKFVRILRKDGKTKPHWYAQLVLEGKPAVKRDPASGAPKHPIGHGVVGIDIGTRTLAYSTDSEVNLLELADRVQNIEQEKRRLQRKMDRSRRAMNPGNYKPDGSIKQGVKLTWNNSKRYKRIQHQYAMIQHHQADIRKQQHNELANYLLTLGDCFFVENMSYCDLAHRANKTEISEKTGRYKRKKRFGKSIANKAPAMLITMLKQKCQSRGLEGVKEVDTHVCASQYNHQTDTCIKKALENRWNIMPDGERIQRDLYSAFLLQHCRRDLPEYNRKELQKEFGEELYRVFDREALQRDYPQFVAYHHMTIQRLSELPHTIPSMGIRRIIS

SEQ ID NO: 1853 - protein, 536 aa, unidentified
  REGION 1..536: note = Category: MG81 effectors
  REGION 1..536: note = Description: MG81-131 effector
  source 1..536: note = uncultivated organism sequence
MNNEEKEKDGATCCLTLPLKLEKWQSDHLEKRFEIARQLYNTLVHAELKRIHRIERMPEYREIERLIEATTDKKEKWALKNQKKQFLRKNGINRNTFTTDMKRLYKHFNDNIGSNVAQHGIVSQVLTAFEKVYIENQSGEVHFKKPGDLRSVQGYSQKKSGGVEIMFREGKIIWNQQGNNDRKGVAREFPLKLSPDNSYEAEMLKKHVKYVRILRNEGKTKPHWYAQLVLEGTPVAKYDPISGAPKHPVGHGVVGIDIGTRTLAYSTDKEVNLLELADHVQNIEQEKRRLQRKMDRSRRATNPENYNPDGTFKRGVKLTRNKSKRYRRIQHQLAMIQHHQADIRKQQHNELANYLLTLGDCFFVENMSYCDLVHRANKTEISEKTGRYKRKKRFGKSIANKAPAMLITMLKQKCQSRGLKGVKEVDTHVRASQYNHQTDTCIEKALENRWNVMPDGERIQRDLYSAFLLQHCKQGLPEYNRKELKKEFGEELYRVFDREALQRDYPQFVAYHHMTIQRLSELPHTIPSMGIRRIIS

SEQ ID NO: 1854 - protein, 534 aa, unidentified
  REGION 1..534: note = Category: MG81 effectors
  REGION 1..534: note = Description: MG81-132 effector
  source 1..534: note = uncultivated organism sequence
MGWKSKGRGGKRVKKSSTDTCCLTLPLKLEKWQSDRLEKRFEIGRQIYNTVVRAELKKLHQVERTPQYREIEQKLKEAKQEEAKELWKKRTQLLSKSGFSEYGFKSDMKYYYQHFKENIGSSVAVHGIASQVWTAFEKVLFSKDGKMVHFKKKGELSSLRGYSQAGKSGGIEIIFRGSYVEWKGLKLPLKLSSNNDYETEMLSKRVKYVRILRKEGKTKPHWYAQLVLEGKPAIKRDPASGAPKHPVGHGVVGIDIGTRTLAYSADSKVDLIELADRVQNIELEKMLLQRKLDRSRRATNPENYKPDGTIKKGVKLTRNKSKRYRKIQHQLAMLQHRQADIRKRQHNELANYLLTLGDCFFVEDMDYRALTRKAKKTEISEKTGRYKRKKRFGKSIANKAPSMLIALLDQKCKSLNLEGVKKVDTAVKASQYNHQTDECKAKELKERWNIMPDGERIQRDLYSAFLLQHCKRGLPEYNRKKLQEAFGNELYRVFDREALQRDYPKFVEYHRETIQRLSALPKTIASMGIRRIIS

SEQ ID NO: 1855 - protein, 334 aa, unidentified
  REGION 1..334: note = Category: MG81 effectors
  REGION 1..334: note = Description: MG81-133 effector
  source 1..334: note = uncultivated organism sequence
MLKKHVKFVRILRNEGKTKPHWYAQLVLEGKPAIKRDPASGTPKHPVGHGVVGIDIGTRTLAYSTDSEVNLLELADRVQNIEQEKRRLQRKMDRSRRAMNPGNYKPDGSIKQGVKLTWNNSKRYKQIQHQYAMIQHHQADIRKQQHNELANYLLTLGDCFFVEDMDYRALTRKAKKTEISEKTGRYKRKKRFGKSIANKAPSMLIALLDQKCKSLNLEGVKKVDTAVKASQYNHQTDECKAKELKERWNIMPDGERIQRDLYSAFLLQHCKRGLPEYNRKKLQETFGNELYRVFDREALQRDYPKFVEYHRETIQRLSALPKTIASMGIRRSIS

SEQ ID NO: 1856 - protein, 538 aa, unidentified
  REGION 1..538: note = Category: MG81 effectors
  REGION 1..538: note = Description: MG81-134 effector
  source 1..538: note = uncultivated organism sequence
MNNEEKEKDGATCCLTLPLKLEKWQSDHLEKRFEIARQLYNTLVHAELKKKCQVERMPEYQEIMKMIDAASNQKEKWALEKKRKAFLEENGFSRNAFKADMEKYYKHFNDNIGANVALHGITAQVWIAFDKVFVDNYKQKGKVHFKKPGELCSVQGYSQKKSGGKEIMFREDRIIWNQQGNRDRKKVKREFLLKLSPDNPYEAEMLKRHVKFVRILRKDGKTKPHWYAQLVLEGKPAVKRDSASGAPKHPIGHGVVGIDIGTRTLAYSTDKEVNLLELADHVQNIEQEKRRLQRKMDRSRRATNPENYNPDGTFKRGVKLTRNKSKRYRRIQHQLAMIQHHQADIRKQQHNELANYLLTLGDCFFVENMSYCDLVHRANKTEISEKTGRYKRKKRFGKSIANKAPAMLITMLKQKCQSRGLEGVKEVDTHVRASQYNHQTDTCIEKALENRWNVMPDGERIQRDLYSAFLLQHCKQGLPEYNRKELKKEFGEELYRVFDREALQRDYPQFVAYHHMTIQRLSELPHTIASMGIRRSIS

SEQ ID NO: 1857 - protein, 554 aa, unidentified
  REGION 1..554: note = Category: MG81 effectors
  REGION 1..554: note = Description: MG81-135 effector
  source 1..554: note = uncultivated organism sequence
MNNEEKEKDGATCCLTLPLKLEKWQSDHLEKRFEIARQLYNTLVHAELKRIHRIERMPEYREIERQIEATTDKKEKWALKNQKKQFLRKNGINRNTFTTDMKRLYKHFNDNIGSNVAQHGIVSQVLTAFEKVYIENQSGEVHFKKPGDLRSVQGYSQKESGGVEIMFRNGKIIWTQQENDDRKKSPKYQQRKKRQNYKGVKGIAREFPVVFSKNNPYEAEMLKKHVKFVRILRKDGKTKPHWYAQLVLEGTPVAKYDPISGAPKHPVGHGVVGIDIGTRTLAYSADSKVDLIELADRVQNIEQEKLLLQRKLDRSRRATNPENYKPDGTIKKGVKLTRNKSKRYRKIQHQLAMLQHRQADIRKRQHNELANYLLTLGDCFFVEDMDYRALTRKAKKTEISEKTGRYKRKKRFGKSIANKAPSMLIALLDQKCKSLNLEGVKKVDTAVKASRYNHQTDECKAKELKERWNIMPDGERIQRDLYSAFLLQHCRRDLPEYNRKKLQETFGNELYRVFDREALQRDYPKFVEYHRKTIQRLSALPKTIASMGIRRIIS

SEQ ID NO: 1858 - protein, 538 aa, unidentified
  REGION 1..538: note = Category: MG81 effectors
  REGION 1..538: note = Description: MG81-136 effector
  source 1..538: note = uncultivated organism sequence
MNNEEKEKDGATCCLTLPLKLEKWQSDHLEKRFEIARQLYNTLVHAELKKKCQVERMPEYQEIMKMIDAASNQKEKWALEKKRKAFLEENGFSRNAFKADMEKYYKHFNDNIGANVALHGITAQVWIAFDKVFVDNYKQKGKVHFKKPGELCSVQGYSQKKSGGKEIMFREDRIIWNQQGNRDRKKVKREFLLKLSPDNPYEAEMLKRHVKFVRILRKDGKTKPHWYAQLVLEGKPAVKRDPASGAPKHPIGHGVVGIDIGTRTLAYSTDKEVNLLELADHVQNIEQEKRRLQRKMDRSRRATNPENYNPDGTFKRGVKLTRNKSKRYRRIQHQLAMIQHHQADIRKQQHNELANYLLTLGDCFFVENMSYCDLVHRANKTEISEKTGRYKRKKRFGKSIANKAPAMLITMLKQKCQSRGLEGVKEVDTHVRASQYNHQTDTCIEKALENRWNVMPDGERIQRDLYSAFLLQHCKQGLPEYNRKELKKEFGEELYRVFDREALQRDYPQFVAYHHMTIQRLSELPHTIPSMGIRRIIS

SEQ ID NO: 1859 - protein, 522 aa, unidentified
  REGION 1..522: note = Category: MG81 effectors
  REGION 1..522: note = Description: MG81-137 effector
  source 1..522: note = uncultivated organism sequence
MKRSSTDTCCLTLPLKLEKWQSDRLEKRFEIGRQIYNTIVHAELKKLRKLERTQQYQEIEQKLENAKQEETKELWKKKRQLLDQNGLSENHFKADMKYYYPHFKDNIASSVAVHGIASQAWTAFEKVLLSKDGKMVHFKKKGELSSLRGYSQAGKSGGIEIIFRGSYVEWKGLKLPLQLSPNNEYETEMLSKRVKYVRILRKDGKTKTHWYAQLVLEGKPAIKRDPASGTPKHPVGHGVVGIDIGTRTLAYSTDKEVNLLELADHVQNIEQEKRRLQRKMDRSRRATNPENYNPDGTFKRGVKLTRNKSKRYRRIQHQLAMIQHHQADIRKQQHNELANYLLTLGDCFFVENMSYCDLVHRANKTEISEKTGRYKRKKRFGKSIANKAPAMLITMLKQKCQSRGLEGVKEVDTHVRASQYNHQTDTCIEKALENRWNVMPDGERIQRDLYSAFLLQHCKQGLPEYNRKELKKEFGEELYRVFDREALQRDYPQFVAYHHMTIQRLSELPHTIPSMGIRRIIS

SEQ ID NO: 1860 - protein, 538 aa, unidentified
  REGION 1..538: note = Category: MG81 effectors
  REGION 1..538: note = Description: MG81-138 effector
  source 1..538: note = uncultivated organism sequence
MDNEEKEKDGATCCLTLPLKLEKWQSDHLEKRFEIARQLYNTLVHAELKKKCQVERMPEYQEIMKMIDAASNQKEKWALEKKRKAFLEENGFNRNAFKADMEKYYKHFNDNIGANVALHGITAQVWIAFDKVFVDNYKQKGKVHFKKPGELCSVQGYSQKKSGGKEIMFREDRIIWNQQGNRDRKKVKREFLLKLSPDNPYEAEMLKRHVKFVRILRKDGKTKPHWYAQLVLEGKPAVKRDPASGAPKHPIGHGVVGIDIGTRTLAYSTDKEVNLLELADHVQNIEQEKRRLQRKMDRSRRATNPENYNPDGTFKRGVKLTRNKSKRYRRIQHQLAMIQHHQADIRKQQHNELANYLLTLGDCFFVENMSYCDLVHRANKTEISEKTGRYKRKKRFGKSIANKAPAMLITMLKQKCQSRGLEGVKEVDTHVRASQYNHQTDTCIEKALENRWNVMPDGERIQRDLYSAFLLQHCKQGLPEYNRKELKKEFGEELYRVFDREALQRDYPQFVAYHHMTIQRLSELPHTIPSMGIRRIIS

SEQ ID NO: 1861 - protein, 534 aa, unidentified
  REGION 1..534: note = Category: MG81 effectors
  REGION 1..534: note = Description: MG81-139 effector
  source 1..534: note = uncultivated organism sequence
MGWKSTGRGGKRVKRSSTDTCCLTLPLKLEKWQSDRLEKRFEIGRQIYNTIVHAELKKLRKLERTQQYQEIEQKLENAKQEETKELWKKKRQLLDQNGLSENHFKADMKHYYPHFKDNIASSVAVHGIASQAWTAFEKVLLSKDGKMVHFKKKGELSSLRGYSQAGKSGGIEIIFRGSYVEWKGLKLPLQLSPNNEYETEMLSKRVKYVRILRKDGKTKTHWYAQLALEGKPAVKRDSISGAPKHPVGHGVVGIDIGTRTLAYSTDSEVNLLELADRVQNIEQEKRRLQRKMDRSRRAMNPGNYKPDGSIKQGVKLTWNNSKRYKRIQHQYAMIQHHQADIRKQQHNELANYLLTLGDCFFVEDMDYRALTRKAKKTEISEKTGRYKRKKRFGKSIANKAPSMLIALLDQKCKSLNLEGVKKVDTAVKASQYNHQTDECKAKELKERWNIMPDGERIQRDLYSAFLLQHCRRDLPEYNRKKLQEAFGNELYRVFDREALQRDYPKFVEYHRKTIQRLSALPKTIASMGIRRIIS

SEQ ID NO: 1862 - protein, 512 aa, unidentified
  REGION 1..512: note = Category: MG81 effectors
  REGION 1..512: note = Description: MG81-140 effector
  source 1..512: note = uncultivated organism sequence
MPTKQKEDSNRCVLTLPLLTEPWQEHIIEKRFKIIEHLKNQLISIELRKLKNLQRTKAYKNLIKQIESVPKSERTVLYKERNKMLKDAGFSQYTFMDDMAGKKSLMQKHFESHINVQIAHKAAIDVWSSFEKFLFGTGQMIHYQKRGTLSSVASKSPKTGMFYYSDENIFKWSGGGTKPKGGIILCLRVASVKTNYEKEMVANNEIKYYRVVRKWMKTKYKYYLQITFAGKPADKHREISTGRVGIDIGTQTIAIASDKSVKLLELADKVNKNHIKKCELQRKLDRSRRYTNPDNFNPDGTVKRGTKGHKLKWNKSKHYLEIVGKIRELERKNADIRKYQHTCLANDILAMGNQIYIEPMNYKGLQKRAKETQVDEKGRYKKKKRFGKSLANKAPAMFVTILKTKVEQHGGEVYEVDIMSYRASQCDHTTGEYTKHGLNDRWRILGNGDKVQRDLYSAFLIKNSNKTHDEIDLDKCSKTYDSFKKLHDKEIENIRNEVKLRERRNISSYGIA

SEQ ID NO: 1863 - protein, 534 aa, unidentified
  REGION 1..534: note = Category: MG81 effectors
  REGION 1..534: note = Description: MG81-141 effector
  source 1..534: note = uncultivated organism sequence
MGWKSKGRGGKRVKRSSTDTCCLTLPLKLEKWQSDRLEKRFEIGRQIYNTIVHAELKKLRKLERTQQYQEIEQKLENAKQEETKELWKKKRQLLDQNGLSENHFKADMKHYYPHFKDNIASSVAVHGIASQAWTAFEKVLLSKDGKMVHFKKKGELSSLRGYSQAGKSGGIEIIFRGSYVEWKGLKLPLKLSPDNDYETEMLSKRVKYVRILRKDGKTKTHWYAQLALEGKPAVKRDSISGAPKHPVGHGVVGIDIGTRTLAYSADSKVDLIELADRVQNIEQEKMLLQRKLDRSRRATNPENYKPDGSIKQGVKLTWNNSKRYKRIQHQYAMIQHHQADIRKQQHNELANYLLTLGDCFFVEDMDYRALTRKAKKTEISEKTGRYKRKKRFGKSIANKAPSMLIALLDQKCKSLNLEGVKKVDTAVKASQYNHQTDECKAKELKERWNIMPDGERIQRDLYSAFLLQHCRRDLPEYNRKKLQEAFGNELYRVFDREALQRDYPKFVEYHRKTIQRLSALPKTIASMGIRRIIS

SEQ ID NO: 1864 - protein, 566 aa, unidentified
  REGION 1..566: note = Category: MG81 effectors
  REGION 1..566: note = Description: MG81-142 effector
  source 1..566: note = uncultivated organism sequence
MGWKSKGRGGTLVDNEEKKEDGATCCLTLPLKLEKWQSDHLEKRFEIARQLYNTLVHAELKRIHRIERMPEYREIERQIEATTDKKEKWALKNQKKQFLRKNGINRNTFTTDMKRLYKHFNDNIGSNVAQHGIVSQVLTAFEKVYIENQSGEVHFKKPGDLRSVQGYSQKESGGKEIMFRNGKIIWNQQENDDRKKSPKYQQRKKRQNYKGVKGIAREFPVVFSKNNPYEAEMLTKHVKFVRILRKDGKTKPHWYAQLVLEGTPVAKYDPISGAPKHPVGHGVVGIDIGTRTLAYSTDKEVNLLELADRVQNIEQEKRRLQRKMDRSRRAMNPENYNSDGTFKRGVKLTRNKSKRYRRIQHQLAMIQHHQADIRKQQHNELANYLLTLGDCFFVENMSYCDLVHRANKTEISEKTGRYKRKKRFGKSIANKAPAMLITMLKQKCQSRGLKGVKEVDTHVRASQYNHQTDTCIEKALENRWNVMPDGERIQRDLYSAFLLQHCKQGLPEYNRKELKKEFGEELYRVFDREALQRDYPQFVAYHHMTIQRLSELPHTIPSMGIRRIIS

SEQ ID NO: 1865 - protein, 550 aa, unidentified
  REGION 1..550: note = Category: MG81 effectors
  REGION 1..550: note = Description: MG81-143 effector
  source 1..550: note = uncultivated organism sequence
MGWKSKGRGVTLVDNEEKKEDGATCCLTLPLKLEKWQSDHLEKRFEIARQLYNTLVHAELKKKCQVERMPEYQEIMKMIDAASNQKEKWALEKKRKAFLEENGFSRNAFKADMEKYYKHFNDNIGANVALHGITAQVWIAFDKVFVDNYKQKGKVHFKKPGELCSVQGYSQKKSGGKEIMFREDRIIWNQQGNRDRKKVKREFLLKLSPDNPYEAEMLKRHVKFVRILRKDGKTKPHWYAQLVLEGKPAVKRDPASGAPKHPIGHGVVGIDIGTRTLAYSTDKEVNLLELADHVQNIEQEKRRLQRKMDRSRRATNPENYNPDGTFKRGVKLTRNKSKRYRRIQHQLAMIQHHQADIRKQQHNELANYLLTLGDCFFVENMSYCDLVHRANKTEISEKTGRYKRKKRFGKSIANKAPAMLITMLKQKCQSRGLEGVKEVDTHVRASQYNHQTDTCIEKALENRWNVMPDGERIQRDLYSAFLLQHCKQGLPEYNRKELKKEFGEELYRVFDREALQRDYPQFVAYHHMTIQRLSELPHTIPSMGIRRIIS

SEQ ID NO: 1866 - protein, 534 aa, unidentified
  REGION 1..534: note = Category: MG81 effectors
  REGION 1..534: note = Description: MG81-144 effector
  source 1..534: note = uncultivated organism sequence
MGWKSKGRGGTLVKRSSTDTCCLTLPLKLEKWQSDRLEKRFEIGRQIYNTIVHAELKKLRKLERTQQYQEIEQKLENAKQEETKELWKKKRQLLDQNGLSENHFKADMKYYYPHFKDNIASSVAVHGIASQAWTAFEKVLLSKDGKMVHFKKKGELSSLRGYSQAGKSGGIEIIFRGSYVEWKGLKLPLQLSPNNEYETEMLSKRVKYVRILRKDGKTKTHWYAQLALEGKPAVKRDSISGAPKHPVGHGVVGIDIGTRTLAYSTDSEVNLLELADRVQNIEQEKRRLQRKMDRSRRAMNPGNYKPDGSIKQGVKLTWNNSKRYKRIQHQYAMIQHHQADIRKQQHNELANYLLTLGDCFFVEDMDYRALTRKAKKTEISEKTGRYKRKKRFGKSIANKAPSMLIALLDQKCKSLNLEGVKKVDTAVKASQYNHQTDECKAKELKERWNIMPDGERIQRDLYSAFLLQHCRRDLPEYNRKKLQEAFGNELYRVFDREALQRDYPKFVEYHRKTIQRLSALPKTIASMGIRRIIS

SEQ ID NO: 1867 - protein, 427 aa, unidentified
  REGION 1..427: note = Category: MG81 effectors
  REGION 1..427: note = Description: MG81-145 effector
  source 1..427: note = uncultivated organism sequence
MKYYYQHFKENIGSSVAVHGIASQVWTAFEKVLFSKDGKMVHFKKKGELSSLRGYSQAGKSGGIEIIFRGSYVEWKGLKLPLKLSPDNDYETEMLSKRVKYVRILRKEGKTKPHWYAQLVLEGKPAIKRDPASGAPKHPVGHGVVGIDIGTRTLAYSADSKVDLIELADRVQNIEQEKMLLQRKLDRSRRATNPENYKPDGTIKKGVKLTRNKSKRYRKIQHQLAMLQHRQADIRKRQHNELANYLLTLGDCFFVEDMDYRALTRKAKKTEISEKTGRYKRKKRFGKSIANKAPSMLIALLDQKCKSLNLEGVKKVDTAVKASQYNHQTDECKAKELKERWNIMPDGERIQRDLYSAFLLQHCKRGLPEYNRKKLQEAFGNELYRVFDREALQRDYPKFVEYHRETIQRLSALPKTIASMGIRRIIS

SEQ ID NO: 1868 - protein, 534 aa, unidentified
  REGION 1..534: note = Category: MG81 effectors
  REGION 1..534: note = Description: MG81-146 effector
  source 1..534: note = uncultivated organism sequence
MGWKSKGRGGTRVKRSSTDTCCLTLPLKLEKWQSDRLEKRFEIGRQIYNTIVHAELKKLRKLERTQQYQEIEQKLENAKQEETKELWKKKRQLLDQNGLSEDHFKADMKYYYPHFKDNIASSVAVHGIASQAWTAFEKVLLSKDGKMVHFKKKGELSSLRGYSQAGKSGGIEIIFRGSYVEWKGLKLPLQLSPNNEYETEMLSKRVKYVRILRKDGKTKTHWYAQLALEGKPAVKRDSISGAPKHPVGHGVVGIDIGTRTLAYSTDSAVNLLELADRVQNIEQEKRRLQRKMDRSRRAMNPGNYKPDGSIKQGVKLTWNNSKRYKRIQHQYAMIQHHQADIRKQQHNELANYLLTLGDCFFVENMSYCDLAHRANKTEISEKTGRYKRKKRFGKSIANKAPAMLITMLKQKCQSRGLKGVKEVDTHVRASQYNHQTDTCIEKALENRWNVMPDGERIQRDLYSAFLLQHCKQGLPEYNRKELKKEFGEELYRVFDREALQRDYPQFVAYHHMTIQRLSELPHTIPSMGIRRIIS

SEQ ID NO: 1869 - protein, 538 aa, unidentified
  REGION 1..538: note = Category: MG81 effectors
  REGION 1..538: note = Description: MG81-147 effector
  source 1..538: note = uncultivated organism sequence
MDNEEKKEDGATCCLTLPLKLEKWQSDHLEKRFEIARQLYNTLVHAELKKKCQVERMPEYQEIMKMIDAASNQKEKWALEKKRKAFLEENGFSRNAFKADMEKYYKHFNDNIGANVALHGITAQVWIAFDKVFVDNYKQKGKVHFKKPGELCSVQGYSQKKSGGKEIMFREDRIIWNQQGNRDRKKVKREFLLKLSPDNPYEAEMLKRHVKFVRILRKDGKTKPHWYAQLVLEGKPAVKRDPASGAPKHPVGHGVVGIDIGTRTLAYSTDKEVNLLELADRVQNIEQEKRRLQRKMDRSRRATNPENYNPDGTFKRGVKLTRNKSKRYRRIQHQLAMIQHHQADIRKQQHNELANYLLTLGDCFFVENMSYCDLVHRANKTEISEKTGRYKRKKRFGKSIANKAPAMLITMLKQKCQSRGLEGVKEVDTHVRASQYNHQTDICIEKALENRWNVMPDGERIQRDLYSAFLLQHCKQGLPEYNRKELKKEFGEELYRVFDREALQRDYPQFVAYHHMTIQRLSELPHTIPSMGIRRIIS

SEQ ID NO: 1870 - protein, 480 aa, unidentified
  REGION 1..480: note = Category: MG81 effectors
  REGION 1..480: note = Description: MG81-148 effector
  source 1..480: note = uncultivated organism sequence
MPEYREIERLIEATTDKKEKWALKNQKKQFLRKNGINRNTFTTDMKRLYKHFNDNIGSNVAQHGIVSQVLTAFEKVYIENQSGEVHFKKPGDLRSVQGYSQKKSGGVEIMFREGKIIWNQQGNNDRKGVAREFPLKLSPDNSYEAEMLKKHVKFVRILRKEGKTKSHWYAQLVLEGKPTVKRDPISGAPKHPVGHGVVGIDIGTRTLAYSTDSEVNLLELADRVQNIEQEKRRLQRKMDRSRRAMNPENYNSDGTFKRGVKLTRNKSKRYRRIQHQLAMIQHHQADIRKQQHNELANYLLTLGDCFFVENMSYCDLVHRANKTEISEKTGRYKRKKRFGKSIANKAPAMLITMLKQKCQSRGLEGVKEVDTHVRASQYNHQTDTCIEKALENRWNVMPDGERIQRDLYSAFLLQHCKQGLPEYDRKELKKEFGEELYRVFDREALQRDYPQFVAYHHMTIQRLSELPHTIPSMGIRRIIS

SEQ ID NO: 1871 - protein, 534 aa, unidentified
  REGION 1..534: note = Category: MG81 effectors
  REGION 1..534: note = Description: MG81-149 effector
  source 1..534: note = uncultivated organism sequence
MGWKSKGRGGKRVKRSSTDTCCLTLPLKLEKWQSDRLEKRFEIGRQIYNTIVHAELKKLRKLERTQQYQEIEQKLENAKQEETKELWKKKRQLLDQNGLSENHFKADMKYYYPHFKDNIASSVAVHGIASQAWTAFEKVLLSKDGKMVHFKKKGELSSLRGYSQAGKSGGIEIIFRGSYVEWKGLKLPLQLSPNNEYETEMLSKRVKYVRILRKDGKTKTHWYAQLALEGKPAVKRDSISGAPKHPVGHGVVGIDIGTRTLAYSADSKVDLIELADRVQNIEQEKMLLQRKLDRSRRATNPENYKPDGSIKQGVKLTWNNSKRYKRIQHQYAMIQHHQADIRKQQHNELANYLLTLGDCFFVEDMDYRALTRKAKKTEISEKTGRYKRKKRFGKSIANKAPSMLIALLDQKCKSLNLEGVKKVDTAVKASQYNHQTDECKAKELKERWNIMPDGERIQRDLYSAFLLQHCRRDLPEYNRKKLQEAFGNELYRVFDREALQRDYPKFVEYHRKTIQRLSALPKTIASMGIRRIIS

SEQ ID NO: 1872 - protein, 548 aa, unidentified
  REGION 1..548: note = Category: MG81 effectors
  REGION 1..548: note = Description: MG81-150 effector
  source 1..548: note = uncultivated organism sequence
MEWKSTGRGGTLVDNEEKKEDGATCCLTLPLKLEKWQSDHLEKRFEIARQLYNTLVHAELKRIHRIERMPEYREIERQIEATTDKKEKWALKNQKKQFLRKNGINRNTFTTDMKRLYKHFNDNIGSNVAQHGIVSQVLTAFEKVYIENQSGEVHFKKPGDLRSVQGYSQKKSGGVEIMFREGKIIWNQQGNNDRKGVAREFPLKLSPDNSYEAEMLKKHVKFVRILRNEGKTKPHWYAQLVLEGKPAIKRDPASGAPKHPVGHGVVGIDIGTRTLAYSTDSKVDLIELADRVQNTEQEKMLLQRKLDRSRRATNPENYKPDGTIKKGVKLTRNKSKRYRKIQHQLAMLQHRQADIRKRQHNELANYLLTLGDCFFVEDMDYRALTRKAKKTEISEKTGRYKRKKRFGKSIANKAPSMLIALLDQKCKSLNLEGVKKVDTAVKASQYNHQTDECKAKELKERWNIMPDGERIQRDLYSAFLLQHCRRDLPEYNRKKLQEAFGNEVYRVFDREALQRDYPKFVEYHRETIQRLSALPKTIASMGIRRIIS

SEQ ID NO: 1873 - protein, 538 aa, unidentified
  REGION 1..538: note = Category: MG81 effectors
  REGION 1..538: note = Description: MG81-151 effector
  source 1..538: note = uncultivated organism sequence
MNNEEKEKEGATCCLTLPLKLEKWQSDHLEKRFEIARQLYNTLVHAELKKKCQVERMPEYQEIMKMIDTASNQKEKWALEKKRKAFLEENGFSRNAFKADMEKYYKHFNDNIGANVALHGITAQVWIAFDKVFVDNYKQKGKVHFKKPGELCSVQGYSQKKSGGKEIMFREDRIIWNQQGNRDRKKVKREFLLKLSPNNPYEAEMLKRHVKFVRILRKDGKTKPHWYAQLVLEGKPAVKRDPISSAPKHPVGHGVVGIDIGTRTLAYSTDKEVNLLELADRVQNIEQEKRRLQRKMDRSRRAMNPENYNSDGTFKRGVKLTRNKSKRYRRIQHQLAMIQHHQADIRKQQHNELANYLLTLGDCFFVENMSYCDLAHRANKTEISEKTGRYKRKKRFGKSIANKAPAMLITMLKQKCQSRGLEGVKEVDTHVCASQYNHQTDTCIKKALENRWNIMPDGERIQRDLYSAFLLQHCRRDLPEYNRKELQKEFGEELYRVFDREALQRDYPQFVAYHHMTIQRLSELPHTIPSMGIRRIIS

SEQ ID NO: 1874 - protein, 534 aa, unidentified
  REGION 1..534: note = Category: MG81 effectors
  REGION 1..534: note = Description: MG81-152 effector
  source 1..534: note = uncultivated organism sequence
MGWKSKGRGGKRVKRSSTDTCCLTLPLKLEKWQSDRLEKRFEIGRQIYNTIVHAELKKLRKLERTQQYQEIEQKLENAKQEETKELWKKKRQLLDQNGLSENHFKADMKHYYPHFKDNIASSVAVHGIASQAWTAFEKVLLSKDGKMVHFKKKGELSSLRGYSQAGKSGGIEIIFRGSYVEWKGLKLPLQLSPNNEYETEMLSKRVKYVRILRKDGKTKTHWYAQLALEGKPAVKRDSISGAPKHPVGHGVVGIDIGTRTLAYSTDSEVNLLELADRVQNIEQEKRRLQRKMDRSRRAMNPGNYKPDGSIKQGVKLTWNNSKRYKRIQHQYAMIQHHQADIRKQQHNELANYLLTLGDCFFVEDMDYRALTRKAKKTEISEKTGRYKRKKRFGKSIANKAPSMLIALLDQKCKSLNLEGVKKVDTAVKASQYNHQTDECKAKELKERWNIMPDGERIQRDLYSAFLLQHCRRDLPEYNRKKLQEAFGNELYRVFDREALQRDYPKFVEYHRKTIQRLSALPKTIASMGIRRIIS

SEQ ID NO: 1875 - protein, 534 aa, unidentified
  REGION 1..534: note = Category: MG81 effectors
  REGION 1..534: note = Description: MG81-153 effector
  source 1..534: note = uncultivated organism sequence
MGWKSKGRGGKRVKRSSTDTCCLTLPLKLEKWQSDRLEKRFEIGRQIYNTIVHAELKKLRKLERTQQYQEIEQKLENAKQEETKELWKKKRQLLDQNGLSENHFKADIKHYYPHFKDNIASSVAVHGIASQAWTAFEKVLLSKDGKMVHFKKKGELSSLRGYSQTGKSGGIEIIFRGSYVEWKGLKLPLKLSPDNDYETEMLSKRVKYVRILRQDGKTKPHWYAQLVLEGKPAVKRDPISGAPKHPIGRGVVGIDIGTRTLAYSADSKVDLIELADRVQNIEQEKLLLQRKLDRSRRATNPENYKPDGTIKKGVKLTRNKSKRYRRIQHQLAMIQHHQADIRKQQHNELANYLLTLGDCFFVEDMDYRALTRKAKKTEISEKTGRYKRKKRFGKSIANKAPAMLITMLKQKCQSRGLKGVKEVDTHVRASQYNHQTDTCIEKALENRWNVMPDGERIQRDLYSAFLLQHCKQGLPEYNRKELKKEFGEELYRVFDREALQRDYPQFVAYHHMTIQRLSELPHTIPSMGIRRIIS

SEQ ID NO: 1876 - protein, 550 aa, unidentified
  REGION 1..550: note = Category: MG81 effectors
  REGION 1..550: note = Description: MG81-154 effector
  source 1..550: note = uncultivated organism sequence
MGWKSKGRGGTLVDNEEKKEDGATCCLTLPLKLEKWQSDHLEKRFEIARQLYNTLVHAELKKKCQVERMPEYQEIMKMIDAASNQKEKWALEKKRKAFLEENGFSRNAFKADMEKYYKHFNDNIGANVALHGITAQVWIAFDKVFVDNYKQKGKVHFKKPGELCSVQGYSQKKSGGKEIMFREDRIIWNQQGNRDRKKVKREFLLKLSPDNPYEAEMLKRHVKFVRILRKDGKTKPHWYAQLVLEGKPAVKRDPASGAPKHPIGHGVVGIDIGTRTLAYSTDKEVNLLELADHVQNIEQEKRRLQRKMDRSRRATNPENYNPDGTFKRGVKLTRNKSKRYRRIQHQLAMIQHHQADIRKQQHNELANYLLTLGDCFFVENMSYCDLVHRANKTEISEKTGRYKRKKRFGKSIANKAPAMLITMLKQKCQSRGLEGVKEVDTHVRASQYNHQTDTCIEKALENRWNVMPDGERIQRDLYSAFLLQHCKQGLPEYNRKELKKEFGEELYRVFDREALQRDYPQFVAYHHMTIQRLSELPHTIPSMGIRRIIS

SEQ ID NO: 1877 - protein, 538 aa, unidentified
  REGION 1..538: note = Category: MG81 effectors
  REGION 1..538: note = Description: MG81-155 effector
  source 1..538: note = uncultivated organism sequence
MDNEEKEKDGATCCLTLPLKLEKWQSDHLEKRFEIARQLYNTLVHAELKKKCQVERMPEYQEIMKMIDAASNQKEKWALEKKRKAFLEENGFSRNTFKADMEKYYKHFNDNIGANVALHGITAQVWIAFDKVFVDNYKQKGKVHFKKPGELCSVQGYSQKKSGGKEIMFREDRIIWNQQGNRDRKKVKREFLLKLSPNNPYEAEMLKRHVKFVRILRKDGKTKPHWYAQLVLEGKPAVKRDPISSAPKHPVGHGVVGIDIGTRTLAYSTDKEVNLLELADRVQNIEQEKRRLQRKMDRSRRAMNPENYNSDGTFKRGVKLTRNKSKRYRRIQHQLAMIQHHQADIRKQQHNELANYLLTLGDCFFVENMSYCDLAHRANKTEISEKTGRYKRKKRFGKSIANKAPAMLITMLKQKCQSRGLEGVKEVDTHVCASQYNHQTDTCIKKALENRWNIMPDGERIQRDLYSAFLLQHCRRDLPEYNRKELQKEFGEELYRVFDREALQRDYPQFVAYHHMTIQRLSELPHTIPSMGIRRIIS

SEQ ID NO: 1878 - protein, 534 aa, unidentified
  REGION 1..534: note = Category: MG81 effectors
  REGION 1..534: note = Description: MG81-156 effector
  source 1..534: note = uncultivated organism sequence
MGWKSKGRGGKRVKKSSTDTCCLTLPLKLEKWQSDRLEKRFEIGRQIYNTVVRAELKKLHQVERTPQYREIEQKLKEAKQEEAKELWKKRTQLLSKSGFSEYGFKSDMKYYYQHFKENIGSSVAVHGIASQVWTAFEKVLFSKDGKMVHFKKKGELSSLRGYSQAGKSGGIEIIFRGSYVEWKGLKLPLKLSSNNDYETEMLSRRVKYVRILRQDGKTKPHWYAQLVLEGKPAVKRDPISGASKHPIGHGAVGIDIGTRTLAYSADSKVDLIELADRVQNIEQEKLLLQRKLDRSRRATNPENYKPDGTIKKGVKLTRNKSKRYRKIQHQLAMLQHRQADIRKRQHNELANYLLTLGDCFFVEDMDYRALTRKAKKTEISEKTGRYKRKKRFGKSIANKAPSMLIALLDQKCKSLNLEGVKKVDTAVKASQYNHQTDECKAKELKERWNIMPDGEQIQRDLYSAFLLQHCRRDLPEYNRKKLQEAFGNELYRVFDREALQRDYPKFVEYHRKTIQRLSALPKTIASMGIRRIIS

SEQ ID NO: 1879 - protein, 511 aa, unidentified
  REGION 1..511: note = Category: MG81 effectors
  REGION 1..511: note = Description: MG81-157 effector
  source 1..511: note = uncultivated organism sequence
MAKCSTDTCCLTLPLRLEKWQEDRLAKRFEIARQIYNTMVRAELKKLRAMEQSEPYKANQEKIQALDWKTQADKQALKALYKERDKLLRDGGFSEYGFKSDIKNYYKHFNNNIGSSVAVHGIAPQVWTAFEKMLFKKEGKKVHFKKKGDIRSLRGYSVTGKSGGVEIIFRETYIEWKGLKLPLKLSPDNIYETQMLSYRVKYVRLLRKPGKRKDRWYAQLSLEGKPVIKYNPKTGEVRHPIGKGAVGLDIGPQTLAYSAATGADLVELANQVQNVEQEKRRLQRKLNRSRRATNPGNYADDGTIRRGIALTHNKSKRYLRTQQELKYLQHQQAEIRKRQHTELANHLLSLGDCFYVEKMVWTSLTHRAKETEISEKTGKIKRKKRFGKSVANKAPATLIGILQRKSAALGIPGVIEVPTSVKASQYNHQSGTYTPKPLSQRWNNMPDGERIQRDLYSAFLLQHYDPQTNTFDANSLHQDYPQFVQYHHDAVLRLYAMPKTPSSMGIKRSLR

SEQ ID NO: 1880 - protein, 522 aa, unidentified
  REGION 1..522: note = Category: MG81 effectors
  REGION 1..522: note = Description: MG81-158 effector
  source 1..522: note = uncultivated organism sequence
MKKSSTDTCCLTLPLKLEKWQSDRLEKRFEIGRQIYNTVVRAELKKLQQVERTPQYREIEQKLKEAKQEEAKELWKTRTQLLSKSGFSEYGFKSDMKYYYQHFKENIGSSVAVHGIASQVWTAFEKVLFSKDGKMVHFKKKGELSSLRGYSQAGKSGGIEIIFRGSYVEWKGLKLPLKLSPDNDYETEMLSKRVKYVRILRKEGKTKPHWYAQLVLEGKPAIKRDPASGAPKHPVGHGVVGIDIGTRTLAYSADSKVDLIELADRVQNIEQEKMLLQRKLDRSRRATNPENYKPDGTIKKGVKLTRNKSKRYRKIQHQLAMLQHRQADIRKRQHNELANYLLTLGDCFFVEDMDYRALTRKAKKTEISEKTGRYKRKKRFGKSIANKAPSMLIALLDQKCKSLNLEGVKKVDTAVKASQYNHQTDECKAKELKERWNIMPDGERIQRDLYSAFLLQHCRRDLPEYNRKKLQETFGNELYRVFDREALQRDYPQFVAYHHMTIQRLSALPKTIASMGIRRSIS

SEQ ID NO: 1881 - protein, 511 aa, unidentified
  REGION 1..511: note = Category: MG81 effectors
  REGION 1..511: note = Description: MG81-159 effector
  source 1..511: note = uncultivated organism sequence
MAKCSTDTCCLTLPLRLEKWQEDRLAKRFEIARQIYNTMVRAELKKLRAMEQSEPYKANQEKIQALDWKTQADKQALKALYKERDKLLQDGGFSERGFKSDIKNYYKHFNNNIGSNVAFHGIAPQVWAAFEKMLFKKEGKKVHFKKKGDIHSLRGYSVTGKSGGVEIIFRETYIEWKGLKLPLKLSPDNIYETQMLSYRVKYVRLLRKPGKRKDRWYAQLSLEGKPVIKYNPKTGEVRHPIGKGAVGLDIGPQTLAYSAATGADLVELANQVQNVEQEKRRLQRKLDRSRRATNPGNYADDGTIRRGIALTHNKSKRYLRTQQELKYLQHQQAEIRKRQHTELANHLLSLGDCFYVEKMVWTSLTHRAKETEISEKTGKIKRKKRFGKSVANKAPATLIEILQRKSAALGIPGVIEVPTSVKASQYNHQSGTYTPKPLSQRWNNMPDGERIQRDLYSAFLLQHYDPQTNTFDANSLHQDYPQFVQYHHDAVLRLYAMPKTPSSMGIKRSLR

SEQ ID NO: 1882 - protein, 538 aa, unidentified
  REGION 1..538: note = Category: MG81 effectors
  REGION 1..538: note = Description: MG81-160 effector
  source 1..538: note = uncultivated organism sequence
MNNEEKEKEGATCCLTLPLKLEKWQSDHLEKRFEIARQLYNTLVHAELKKKCQVERMPEYQEIMKMIDAASNQKEKWALEKKRKAFLEENGFSRNAFKADMEKYYKHFNDNIGANVALHGITAQVWIAFDKVFVDNYKQKGKVHFKKPGELCSVQGYSQKKSGGKEIMFREDRIIWNQQGNRDRKKVKREFLLKLSPDNPYEAEMLKRHVKFVRILRKDGKTKPHWYAQLVLEGKPAVKRDPASGAPKHPIGHGVVGIDIGTRTLAYSTDKEVNLLELADRVQNIEQEKRRLQRKMDRSRRATNPENYNPDGTFKRGVKLTRNKSKRYKRIQHQYAMIQHHQADIRKQQHNELANYLLTRGDCFFVENMSYCDLVHRANKTEISEKTGRYKRKKRFGKSIANKAPAMLITMLKQKCQSRGLEGVKEVDTHVRASQYNHQTDTCIEKALENRWNVMPDGERIQRDLYSAFLLQHCKQGLPEYNRKELKKEFGEELYRVFDREALQRDYPQFVAYHHMTIQRLSELPHTIPSMGIRRIIS

SEQ ID NO: 1883 - protein, 538 aa, unidentified
  REGION 1..538: note = Category: MG81 effectors
  REGION 1..538: note = Description: MG81-161 effector
  source 1..538: note = uncultivated organism sequence
MNNEEKEKDGATCCLTLPLKLEKWQSDHLEKRFEIARQLYNTLVHAELKKKCQVERMPEYQEIMKMIDTASNQKEKWALEKKRKAFLEENGFSRNAFKADMEKYYKHFNDNIGANVALHGITAQVWIAFDKVFVDNYKQKGKVHFKKPGELCSVQGYSQKKSGGKEIMFREDRIIWNQQGNRDRKKVKREFLLKLSPDNPYEAEMLKRHVKFVRILRKDGKTKPHWYAQLVLEGKPAVKRDPASGAPKHPIGHGVVGIDIGTRTLAYSTDKEVNLLELADRVQNIEQEKRRLQRKMDRSRRAMNPENYNSDGTFKRGVKLTRNKSKRYRRIQHQLAMIQHHQADIRKQQHNELANYLLTLGDCFFVENMSYCDLVHRANKTEISEKTGRYKRKKRFGKSIANKAPAMLITMLKQKCQSRGLEGVKEVDTHVRASQYNHQTDTCIEKALENRWNVMPDGERIQRDLYSAFLLQHCKQGLPEYNRKELKKEFGEELYRVFDREALQRDYPQFVAYHHMTIQRLSELPHTIASMGIRRSIS

SEQ ID NO: 1884 - protein, 538 aa, unidentified
  REGION 1..538: note = Category: MG81 effectors
  REGION 1..538: note = Description: MG81-162 effector
  source 1..538: note = uncultivated organism sequence
MDNEEKEKDGATCCLTLPLKLEKWQSDHLEKRFEIARQLYNTLVHAELKKKCQVERMPEYQEIMKMIDTASNQKEKWALEKKRKAFLEENGFSRNAFKADMEKYYKHFNDNIGANVALHGITAQVWIAFDKVFVDNYKQKGKVHFKKPGELCSVQGYSQKKSGGKEIMFREDRIIWNQQGNRDRKKVKREFLLKLSPNNPYEAEMLKRHVKFVRILRKDGKTKPHWYAQLVLEGKPAVKRDPISSAPKHPVGHGVVGIDIGTRTLAYSTDKEVNLLELADRVQNIEQEKRRLQRKMDRSRRAMNPENYNSDGTFKRGVKLTRNKSKRYRRIQHQLAMIQHHQADIRKQQHNELANYLLTLGDCFFVENMSYCDLVHRANKTEISEKTGWYKRKKRFGKSIANKAPAMLITMLKQKCQSRGLEGVKEVDTHVRASQYNHQTDTCIEKALENRWNVMPDGERIQRDLYSAFLLQHCKQGLPEYNRKELKKEFGEELYRVFDREALQRDYPQFVAYHHMTIQRLSELPHTIPSMGIRRIIS

SEQ ID NO: 1885 - protein, 536 aa, unidentified
  REGION 1..536: note = Category: MG81 effectors
  REGION 1..536: note = Description: MG81-163 effector
  source 1..536: note = uncultivated organism sequence
MDNEEKEKDGATCCLTLPLKLEKWQSDHLEKRFEIARQLYNTLVHAELKRIHRIERMPEYREIERLIEATTDKKEKWALKNQKKQFLRKNGINRNTFTTDMKRLYKHFNDNIGSNVAQHGIVSQVLTAFEKVYIENQSGEVHFKKPGDLRSVQGYSQKKSGGVEIMFREGKIIWNQQGNNDRKGVAREFPLKLSPDNSYEAEMLKKHVKFVRILRKDGKTKPHWYAQLVLEGTPVAKYDPISGAPKHPVGHGVVGIDIGTRTLAYSTDKEVNLLELADRVQNIEQEKRRLQRKMDRSRRAMNPENYNSDGTFKRGVKLTRNKSKRYRRIQHQLAMIQHHQADIRKQQHNELANYLLTLGDCFFVENMSYCDLVHRANKTEISEKTGRYKRKKRFGKSIANKAPAMLITMLKQKCQSRGLKGVKEVDTHVRASQYNHQTDTCIEKALENRWNVMPDGERIQRDLYSAFLLQHCKQGLPEYNRKELKKEFGEELYRVFDREALQRDYPQFVAYHHMTIQRLSELPHTIPSMGIRRIIS

SEQ ID NO: 1886 - protein, 550 aa, unidentified
  REGION 1..550: note = Category: MG81 effectors
  REGION 1..550: note = Description: MG81-164 effector
  source 1..550: note = uncultivated organism sequence
MGWKSKGRGGTLVDNEEKKEDGATCCLTLPLKLEKWQSDHLEKRFEIARQLYNTLVHAELKKKCQVERMPEYQEIMKMIDTASNQKEKWALEKKRKAFLEENGFSRNAFKADMEKYYKHFNDNIGANVALHGITAQVWIAFDKVFVDNYKQKGKVHFKKPGELCSVQGYSQKKSGGKEIMFREDRIIWNQQGNRDRKKVKREFLLKLSPNNPYEAEMLKRHVKFVRILRKDGKTKPHWYAQLVLEGKPAVKRDPISSAPKHPVGHGVVGIDIGTRTLAYSTDKEVNLLELADRVQNIEQEKRRLQRKMDRSRRAMNPENYNSDGTFKRGVKLTRNKSKRYRRIQHQLAMIQHHQADIRKQQHNELANYLLTLGDCFFVENMSYCDLAHRANKTEISEKTGRYKRKKRFGKSIANKAPAMLITMLKQKCQSRGLEGVKEVDTHVCASQYNHQTDTCIKKALENRWNIMPDGERIQRDLYSAFLLQHCRRDLPEYNRKELQKEFGEELYRVFDREALQRDYPQFVAYHHMTIQRLSELPHTIPSMGIRRIIS

SEQ ID NO: 1887 - protein, 534 aa, unidentified
  REGION 1..534: note = Category: MG81 effectors
  REGION 1..534: note = Description: MG81-165 effector
  source 1..534: note = uncultivated organism sequence
MVRKSKGRGGTLVKKSSTDTCCLTLPLKLEKWQSDRLEKRFEIGRQIYNTVVRAELKKLQQVERTPQYREIEQKLKEAKQEEAKELWKTRTQLLSKSGFSEYGFKSDMKYYYQHFKENIGSSVAVHGIASQVWTAFEKVLFSKDGKMVHFKKKGELSSLRGYSQAGKSGGIEIIFRGSYVEWKGLKLPLKLSPDNDYETEMLSKRVKYVRILRKEGKTKPHWYAQLVLEGKPAIKRDPASGAPKHPVGHGVVGIDIGTRTLAYSTDKEVNLLELADRVQNIEQEKRRLQRKMDRSRRAMNPENYNSDGTFKRGVKLTRNKSKRYRRIQHQLAMIQHHQADIRKQQHNELANYLLTLGDCFFVENMSYCDLVHRANKTEISEKTGRYKRKKRFGKSIANKAPAMLITMLKQKCQSRGLKGVKEVDTHVRASQYNHQTDTCIEKALENRWNVMLDGERIQRDLYSAFLLQHCKQGLPEYNRKELKKEFGEELYRVFDREALQRDYPQFVAYHHMTIQRLSELPHTIPSMGIRRIIS

SEQ ID NO: 1888 - protein, 512 aa, unidentified
  REGION 1..512: note = Category: MG81 effectors
  REGION 1..512: note = Description: MG81-166 effector
  source 1..512: note = uncultivated organism sequence
MPTKQKEDSNRCVLTLPLLTEPWQEHIIEKRFKIIEHLKNQLISIELRKLKKLQRTKAYKNLIKQIESVPKSERTALYKERNKMLKDAGFSQYTFMDDMAGKKSLMQKHFESHINVQIAHKAAIDVWSSFEKFLFGTGQIVHYQKRGTLSSVASKSPKTGMFYYSDENIFKWSGGGTKPKGGIILCLRVASVKTNYEKEMVANNEIKYYRVVRKWMKTKYKYYLQITFAGKPADKHREISTGRVGIDIGTQTIAIASDKSVKLLELADKVNKNHIKKCELQRKLDRSRRYTNPDNFNPDGTVKRGTKGHKLKWNKSKHYIDIAGKIRELERKNADIRKYQHTCLANDILAMGNQIYIEPMNYKGLQKRAKETQVDEKGRYKKKKRFGKSLANKAPAMFVTILKTKAEQHGGEVYEVDIMSYRASQCDHTTGEYTKHGLNDRWRILGNGDKVQRDLYSAFLIKNSNKTHDEIDLDKCSKTYDNFKKLHDKEIENIRNEVILRKRRNISSYGIA

SEQ ID NO: 1889 - protein, 427 aa, unidentified
  REGION 1..427: note = Category: MG81 effectors
  REGION 1..427: note = Description: MG81-167 effector
  source 1..427: note = uncultivated organism sequence
MKYYYQHFKENIGSSVAVHGIASQVWTAFEKVLFSKDGKMVHFKKKGELSSLRGYSQAGKSGGIEIIFRGSYVEWKGLKLPLKLSPDNDYETEMLSKRVKYVRILRKEGKTKPHWYAQLVLEGKPAIKRDPASGAPKHPVGHGVVGIDIGTRTLAYSADSKVDLIELADRVQNIEQEKMLLQRKLDRSRRATNPENYKPDGTIKKGVKLTRNKSKRYRKIQHQLAMLQHHQADIRKQQHNELANYLLTLGDCFFVENMSYCDLAHRANKTEISEKTGRYKRKKRFGKSIANKAPAMLITMLKQKCQSRGLEGVKEVDTHVCASQYNHQTDTCIKKALENRWNIMPDGERIQRDLYSAFLLQHCRRDLPEYNRKELQKEFGEELYRVFDREALQRDYPQFVAYHHMTIQRLSELPHTIPSMGIRRIIS

SEQ ID NO: 1890 - protein, 538 aa, unidentified
  REGION 1..538: note = Category: MG81 effectors
  REGION 1..538: note = Description: MG81-168 effector
  source 1..538: note = uncultivated organism sequence
MNNEEKEKEGATCCLTLPLKLEKWQSDHLEKRFEIARQLYNTLVHAELKKKCQVERMPEYQEIMKMIDTASNQKEKWALEKKRKAFLEENGFSRNAFKADMEKYYKHFNDNIGANVALHGITAQVWIAFDKVFVDNYKQKGKVHFKKPGELCSVQGYSQKKSGGKEIMFREDRIIWNQQGNRDRKKVKREFLLKLSPDNPYEAEMLKRHVKFVRILRKDGKTKPHWYAQLVLEGKPAVKRDPISSAPKHPVGHGVVGIDIGTRTLAYSTDKEVNLLELADHVQNIEQEKRRLQRKMDRSRRATNPENYNPDGTFKRGVKLTRNKSKRYRRIQHQLAMIQHHQADIRKQQHNELANYLLTLGDCFFVENMSYCDLVHRANKTEISEKTGRYKRKKRFGKSIANKAPAMLITMLKQKCQSRGLEGVKEVDTHVCASQYNHQTDTCIKKALENRWNIMPDGERIQRDLYSAFLLQHCRRDLPEYNRKELQKEFGEELYRVFDREALQRDYPQFVAYHHMTIQRLSELPHTIPSMGIRRIIS

SEQ ID NO: 1891 - protein, 529 aa, unidentified
  REGION 1..529: note = Category: MG81 effectors
  REGION 1..529: note = Description: MG81-169 effector
  source 1..529: note = uncultivated organism sequence
MILLANNNNNNTDTCVLTLPLRVEKWQEDCLLKRFEAARRIYNSLLNFELKKLRQLERTVEYRQIQSVISSAYRSNTKDSPECKDAFKRREKLISANGISEYGFKSDVKFFYKHFDGLIGSSVAVHCIAVQLWAAFDKYLSGSGKEIHFKRLGDISSLKGYSVKGKSGGREIIFRGQYVEWTRKKKKLLLPLKIDPDNEYEREMLSRRVKYVRIIKKPGKNRLRWYAQLTLEGKPALKYSAETGKPIHSVGKGDVGIDIGPQTVAYASDKEVALLELADRVTNIEHQKKKLQRKLDRSRRATNPDNYKPDGTIKRGVKLTRNKSKRYLKLQSKLAYIQHRQAEIRKLQHTCLANHMLTLGDRFFVEKMNWPGLAHRAKETSISEKTGRYKRKKRFGKSLANKAPAMFISILKRKCETLGLPGVVEVDTYNLKASQYNHLSDTYEKKSLSERWNYMPISDGSDSSKTKRIQRDLYSAFLLQHTIPQPCSFDKEALRIDYPNFVTMHDAEIHRLESLPKTVTSMGVRRSHS

SEQ ID NO: 1892 - protein, 534 aa, unidentified
  REGION 1..534: note = Category: MG81 effectors
  REGION 1..534: note = Description: MG81-170 effector
  source 1..534: note = uncultivated organism sequence
MGWKSKGRGRTRVKRSSTDTCCLTLPLKLEKWQSDRLEKRFEIGRQIYNTVVRAELKKLQQVERTPQYREIEQKLKGAKQEEAKELWKKRTQLLSQSGFSEYGFKSDMKYYYQHFKENIGSSVAVHGIASQVWTAFEKVLFSKDGKMVHFKKKGELSSLRGYSQAGKSGGVEIIFRGSYVEWKGLKLPLKLSPDNDYETEMLSKRVKYVRILRQDGKTKPHWYAQLVLEGKPAIKRDPASGAPKHPIGHGVVGIDIGTRTLAYSADSKVDLIELADRVQNIEQEKMLLQRKLDRSRRATNPGNYNPDGTIKCGVKLTRNKSKRYRKIQHQLAMIQHHQADIRKQQHNELANYLLTLGDCFFVENMSYCDLVHRANKTEISEKTGRYKRKKRFGKSIANKAPAMLITMLKQKCQSRGLKGVKEVDTHVRASQYNHQTDTCIEKALENRWNVMPDGERIQRDLYSAFLLQHCKQGLPEYNRKELKKEFGEELYRVFDREALQRDYPQFVAYHHMTIQRLSELPHTIPSMGIRRIIS

SEQ ID NO: 1893 - protein, 512 aa, unidentified
  REGION 1..512: note = Category: MG81 effectors
  REGION 1..512: note = Description: MG81-171 effector
  source 1..512: note = uncultivated organism sequence
MAKCSTDTCCLTLPLRLEKWQEDRLAKRFEIARQIYNTMVRAELKKLRAIEQSEPYKANQEKIQALDWKTQADKQALKALYKERDKLLRNGGFSEYGFKYDIKNYYMHFNNNIGSNVAVHGIAPQVWAAFEKMLFKKEGKKVHFKKKGDIRSLRGYSVTRKSGGVEIIFRETYIEWKGLKLPLKLSPDNIYETQMLSYRVKYVRLLRKPGKRKDRWYAQLSLEGKPVIKYNPKTGEVRHPIGKGAVGLDIGPQTLAYSAATGADLVELANQVQNVEQEKRRLQRKLDRSRRATNPGNYADDGTIRHGIALTHNKSKRYLRTQQELKYLQHQQAEIRKRQHTELANHLLSLGDCFYVEKMVWTSLTHRAKETEISEKTGKIKRKKRFGKSVANKPPATLIGILQLKSAALGIPGVIEVPTSVKASQYNHQSGTYTPKPLSQRWNNMPDGERIQRDLYSAFLLQHYDPQTNTFDANSLHQDYPQFVQYHHDAVLRLYAMPKTPSSMGIKRRSLR

SEQ ID NO: 1894 - protein, 534 aa, unidentified
  REGION 1..534: note = Category: MG81 effectors
  REGION 1..534: note = Description: MG81-172 effector
  source 1..534: note = uncultivated organism sequence
MGWKSKGRGGTLVKKSSTDTCCLTLPLKLEKWQSDRLEKRFEIGRQIYNTVVRAELKKLQQVERTPQYREIEQKLKEAKQEEAKELWKTRTQLLSKSGFSEYGFKSDMKYYYQHFKENIGSSVAVHGIASQVWTAFEKVLFSKDGKMVHFKKKGELSSLRGYSQAGKSGGIEIIFRGSYVEWKGLKLPLKLSPDNDYETEMLSKRVKYVRILRKEGKTKPHWYAQLVLEGKPAIKRDPASGAPKHPVGHGVVGIDIGTRTLAYSADSKVDLIELADRVQNIEQEKMLLQRKLDRSRRATNPENYKPDGTIKKGVKLTRNKSKRYRKIQHQLAMLQHRQADIRKRQHNELANYLLTLGDCFFVEDMDYRALTRKAKKTEISEKTGRYKRKKRFGKSIANKAPSMLIALLDQKCKSLNLEGVKKVDTAVKASQYNHQTDECKAKELKERWNIMPDGERIQRDLYSAFLLQHCRRDLPEYNRKKLQETFGNELYRVFDREALQRDYPKFVEYHRETIQRLSALPKTIASMGIRRIIS

SEQ ID NO: 1895 - protein, 522 aa, unidentified
  REGION 1..522: note = Category: MG81 effectors
  REGION 1..522: note = Description: MG81-173 effector
  source 1..522: note = uncultivated organism sequence
MKRSSTDTCCLTLPLKLEKWQSDRLEKRFEIGRQIYNTIVHAELKKLRKLERTQQYQEIEQKLENAKQEETKELWKKKRQLLDQNGLSENHFKADMKYYYPHFKDNIASSVAVHGIASQAWTAFEKVLLSKDGKMVHFKKKGELSSLRGYSQAGKSGGIEIIFRGSYVEWKGLKLPLQLSPNNEYETEMLSKRVKYVRILRKDGKTKTHWYAQLVLEGKPAIKRDPASGTPKHPVGHGVVGIDIGTRTLAYSTDKEVNLLELADHVQNIEQEKRRLQRKMDRSRRATNPENYNPDGTFKRGVKLTRNKSKRYRRIQHQLAMIQHHQADIRKQQHNELANYLLTLGDCFFVENMSYCDLVHRANKTEISEKTGRYKRKKRFGKSIANKAPAMLITMLKQKCQSRGLEGVKEVDTHVRASQYNHQTDTCIEKALENRWNVMPDGERIQRDLYSAFLLQHCKQGLPEYDRKELKKEFGEELYRVFDREALQRDYPQFVAYHHMTIQRLSELPHTIPSMGIRRIIS

SEQ ID NO: 1896 - protein, 522 aa, unidentified
  REGION 1..522: note = Category: MG81 effectors
  REGION 1..522: note = Description: MG81-174 effector
  source 1..522: note = uncultivated organism sequence
MKRSSTDTCCLTLPLKLEKWQSDRLEKRFEIGRQIYNTIVHAELKKLRKLERTQQYQEIEQKLENAKQEETKELWKKKRQLLDQNGLSENHFKADMKYYYPHFKDNIASSVAVHGIASQAWTAFEKVLLSKDGKMVHFKKKGELSSLRGYSQAGKSGGIEIIFRGSYVEWKGLKLPLQLSPNNEYETEMLSKRVKYVRILRKDGKTKAHWYAQLALEGKPAVKRDSISGAPKHPVGHGVVGIDIGTRTLAYSTDSEVNLLELADRVQNIEQEKRRLQRKMDRSRRAMNPGNYKPDGSIKQGVKLTWNNSKRYKRIQHQYAMIQHHQADIRKQQHNELANYLLTLGDCFFVENMSYCDLAHRANKTEISEKTGRYKRKKRFGKSIANKAPAMLITMLKQKCQSRGLEGVKEVDTHVCASQYNHQTDTCIKKALENRWNIMPDGERIQRDLYSAFLLQHCRRDLPEYNRKELQKEFGEELYRVFDREALQRDYPQFVAYHHMTIQRLSELPHTIPSMGIRRIIS

SEQ ID NO: 1897 - protein, 534 aa, unidentified
  REGION 1..534: note = Category: MG81 effectors
  REGION 1..534: note = Description: MG81-175 effector
  source 1..534: note = uncultivated organism sequence
MGWKSKGRGGTRVKKSSTDTCCLTLPLKLEKWQSDRLEKRFEIGRQIYNTVVRAELKKLQQVERTPQYREIEQKLKGAKQEEAKELWKKRTQLLSKSGFSEYGFKSDMKYYYQHFKENIGSSVAVHGIASQVWTAFEKVLFSKDGKMVHFKKKGELSSLRGYSQAGKSGGVEIIFRGSYVEWKGLKLPLKLSPDNDYETEMLSKRVKYVRILRKEGKTKPHWYAQLVLEGKPAIKRDPASGTPKHPVGHGVVGIDIGTRTLAYSTDSEVNLLELADRVQNIEQEKRRLQRKMDRSRRAMNPENYNPDGTFKRGVKLTRNKSKRYRRIQHQLAMIQHHQADIRKQQHNELANYLLTLGDCFFVENMSYCDLVHRANKTEISEKTGRYKRKKRFGKSIANKAPAMLITMLKQKCQSRGLKGVKEVDTHVRASQYNHQTDTCIEKALENRWNVMPDGERIQRDLYSAFLLQHCKQGLPEYDRKELKKEFGEELYRVFDREALQRDYPQFVAYHHMTIQRLSELPHTIPSMGIRRIIS

SEQ ID NO: 1898 - protein, 511 aa, unidentified
  REGION 1..511: note = Category: MG81 effectors
  REGION 1..511: note = Description: MG81-176 effector
  source 1..511: note = uncultivated organism sequence
MGKSKTETCCLTLPLKLEKWQEDRLAKRFEIARQIYNTLVHAELKKLNQIERSSEYQTIQDQITNLDRNDPERIKELPSLYKKRTKLLRDAGFTEYGFKSDVKYYYKYFHKNIGSSVAVHGIAPQVWAAFEKKLFKKQGKIVHYKRKGTLRSVKGGSATGKSGGTEIIFRGTYIQWKDLNLPLKQSPDNAYESEMLGYRVKYVRILRKPGKSKDRWYAQLVLEGKPVIKRNPMTGAALHPVGHGAVGLDIGPQTLAYSAADGVGLLELADQVQNIERQKALLQRKLDRSRRASNPDNYNEDGTIKRGVKLTRNQSKRYCKTQRDLAYLQHCQAETRKRQHIALANHLLTLGDRFYVEQMSWAALARRSKKTEVSEKTGKIKRKKRFGKSIANKAPAMLIEILRQKCISLGLPGVVDVPTSIKASQYNHQSKDYIKKNLSERWNDMPDGEKIQRDLYSAFLLQHCTPELNAFDQESLQQDYPQFVQYHHQVMQQLSEMPKTPSSMGIRRRTS

SEQ ID NO: 1899 - protein, 515 aa, unidentified
  REGION 1..515: note = Category: MG81 effectors
  REGION 1..515: note = Description: MG81-177 effector
  source 1..515: note = uncultivated organism sequence
MAEETGRCVLTLPLLTEPWQEHIMEKRFSIVEHLKNQLIAMELRKLKNLQRTKAYRELAEKIEATPKEKRAPLYRERKKMLQDAGFSEYAFKHDMQSPENPMQQHFSMHITSKVAERAASDVWRAFQKYLYSNGNEVHFHKRGTLKSVACQANGSGMYYQDDTFAWHRGKTAKVKPAKDNPQGRKKRDKNKQLHIKVRPPQNAYEREMLKKEVKEIRVVRQWVKSRYKYYLQLTLVGPPVPKERKLGVGRVGIDIGTQTIAISSETSVQLRELAPGVNDNHEKKLRLQRQMDRSKRATNPENYNPDGTIRRPPKGERMRWNFSKRYKKLAGKVRELERKNAAIRKYEHTCLANEILSLGDEIYVEKMSFSGLQRRAKETKKDAKGCYLKKKRFGKSLANKAPATLMQILKTKAALTGQVAEEVNTTAFRASQFDHTSGQYRKPLLSERWKTLSGGERVQRDMYSAFLLMNSDSDKTQSDAELCSLTFENFRRLHDAEVTRIRNEHKRHLRSFGID

SEQ ID NO: 1900 - protein, 478 aa, unidentified
  REGION 1..478: note = Category: MG81 effectors
  REGION 1..478: note = Description: MG81-178 effector
  source 1..478: note = uncultivated organism sequence
MGWKSKGRGGTLVKKSSTDTCCLTLPLKLEKWQSDRLEKRFEIGRQIYNTVVRAELKKLQQVERTPQYREIEQKLKEAKQEEAKELWKTRTQLLSKSGFSEYGFKSDMKYYYQHFKENIGSSVAVHGIASQVWTAFEKVLFSKDGKMVHFKKKGELSSLRGYSQAGKSGGIEIIFRGSYVEWKGLKLPLKLSPDNDYETEMLSKRVKYVRILRKEGKTKPHWYAQLVLEGKPAIKRDPASGAPKHPVGHGVVGIDIGTRTLAYSADSKVDLIELADRVQNIEQEKMLLQRKLDRSRRATNPENYKPDGTIKKGVKLTRNKSKRYRKIQHQLAMLQHRQADIRKRQHNELANYLLTLGDCFFVEDMDYRALTRKAKKTEISEKTGRYKRKKRFGKSIANKAPSMLIALLDQKCKSLNLEGVKKVDTAVKASQYNHQTDECKAKELKERWNIMPDGERIQRDLYSAFLLQHCRRDLPEYN

SEQ ID NO: 1901 - protein, 438 aa, unidentified
  REGION 1..438: note = Category: MG81 effectors
  REGION 1..438: note = Description: MG81-179 effector
  source 1..438: note = uncultivated organism sequence
MEKYYKHFNDNIGANVALHGITAQVWIAFDKVFVDNYKQKGKVHFKKPGELCSVQGYSQKKSGGKEIMFREDRIIWNQQGNRDRKKVKREFLLKLSPDNPYEAEMLKRHVKFVRILRKDGKTKPHWYAQLVLEGKPAVKRDPASGAPKHPVGHGVVGIDIGTRTLAYSTDKEVNLLELADRVQNIEQEKRRLQRKMDRSRRATNPENYNPDGTFKRGVKLTRNKSKRYRRIQHQLAMIQHHQADIRKQQHNELANYLLTLGDCFFVENMSYCDLVHRANKTEISEKTGRYKRKKRFGKSIANKAPAMLITMLKQKCQSRGLEGVKEVDTHVRASQYNHQTDICIEKALENRWNVMPDGERIQRDLYSAFLLQHCKQGLPEYNRKELKKEFGEELYRVFDREALQRDYPQFVAYHHMTIQRLSELPHTIPSMGIRRIIS

SEQ ID NO: 1902 - protein, 511 aa, unidentified
  REGION 1..511: note = Category: MG81 effectors
  REGION 1..511: note = Description: MG81-180 effector
  source 1..511: note = uncultivated organism sequence
MKKSNTDTCCLTLPLKLEKWQEDRLAKRFEIARQIYNTMVHAELKKLRNIENSQPYRQIQKQIEALNWKNQNDKARLKSLYNDRNKLLNTIGFSEYGFKADIKYYYKHFNDNIGSSVAVHGIAPQVWAAFEKMLFHKEGKKVHYKKKDDIHSLHGYSVTGKSGGVEIIFRKTYIEWKGLKLPLKRSPDNAYETEMLDRRVKYVRLLRKPGKRKDCWYAQLSLEGKPAIKRDPKSGKRRHSIGRGAVGLDIGPQTLAYSACGAADLVELADQVQNIEQMKRRLQRKLDRSRRATNPDNYADNGTIRRGVKLTHNKSNRYRRTQRELRYLQHCQAEIRKRQHIELANHLLALGDCFYVEDMAWPSLTHRAKETAISEKTGRIKRKKRFGKSVANKAPATLIGILEQKCNSLGLPGVVKVPTSLRASQYNHQSGEYTSKPLSQRWNNMPDGERIQRDLYSAFLLQHYDPKAGNFDSVLLQQDYPQFVQYHHRAIQRLSTVPKTLSSMGIQRSLR

SEQ ID NO: 1903 - protein, 511 aa, unidentified
  REGION 1..511: note = Category: MG81 effectors
  REGION 1..511: note = Description: MG81-181 effector
  source 1..511: note = uncultivated organism sequence
MAKCSTDTCCLTLPLRLEKWQEDRLAKRFEIARQIYNTMVRAELKKLRAMEQSEPYKANQEKIQALDWKTQADKQALKALYKERDKLLRDGGFSEYGFKSDIKNYYKHFNNNIGSSVAVHGIAPQVWAAFEKMLFKKEGKKVHFKKKGDIHSLRGYSVTGKSGGVEIIFRETYIEWKGLKLPLKLSPDNIYETQMLSYRVKYVRLLRKPGKRKDRWYAQLSLEGKPVIKYNPKTGEVRHPIGKGAVGLDIGPQTLAYSAATGADLVELANQVQNVEQEKRRLQRKLDRSRRATNPGNYADDGTIRRGIALTHNKSKRYLRTQQELKYLQHQQAEIRKRQHTELANHLLSLGDCFYVEKMVWTSLTHRAKETEISEKTGKIKRKKRFGKSVANKAPATLIGILQRKSAALGIPGVIEVPTSVKASQYNHQSGTYTPKPLSQRWNNMPDGERIQRDLYSAFLLQHYDPQTNTFDANSLHQDYPQFVQYHHDAVLRLYAMPKTPSSMGIKRSLR

SEQ ID NO: 1904 - protein, 511 aa, unidentified
  REGION 1..511: note = Category: MG81 effectors
  REGION 1..511: note = Description: MG81-182 effector
  source 1..511: note = uncultivated organism sequence
MAKCSTDTCCLTLPLRLEKWQEDRLAKRFEIARQIYNTMVRAELKKLRAMEQSEPYKANQEKIQALDWKTQTDKQALKALYKERDKLLRDGGFSEYGFKSDIKNYYKHFNNNIGSNVAFHGIAPQVWAAFEKMLFKKEGQKVHFKKKGDIHSLRGYSAAGKSGGVEIIFRETYIEWKGLKLPLKLSPDNIYETQMLSYRVKYVRLLRKPGKRKDRWYAQLSLEGKPVIKYNPKTGEVRHPIGKGAVGLDIGPQTLAYSAATGADLVELANQVQNVEQEKRRLQRKLDRSRRATNPGNYADDGTIRRGIALTHNKSKRYLRTQQELKYLQHQQAEIRKRQHTELANHLLSLGDCFYVEKMVWTSLTHRAKETEISEKTGKIKRKKRFGKSVANKAPATLIGILQRKSAALGIPGVIEVPTSVKASQYNHQSGTYTPKPLSQRWNNMPDGERIQRDLYSAFLLQHYDPQTNTFDANSLHQDYPQFVQYHHDAVLRLYAMPKTPSSMGIKRSLR

SEQ ID NO: 1905 - protein, 512 aa, unidentified
  REGION 1..512: note = Category: MG81 effectors
  REGION 1..512: note = Description: MG81-183 effector
  source 1..512: note = uncultivated organism sequence
MEKTKGSDDTCCLTLPLKLEKWQEDRLARRLELARQIYNTLMHAELKKLRNVQQSPEYRRMQAEMRALDWKKEADKPPLRKLYKERDKLLKKAGFTKFGFKNDMKYYYKHFNQNIGSSVAVHGIASQVWTAFDKMLFQKDGKKVHFKKYGDLHSVQGYSAAKSGGVEIMFRGTCIEWKGLELPLKRKPDNAYETEMLQKHIKFVRILRKPGKNRDRWYAQLTLAGKPAVKRDAVSGRQIHPLGHGPVGLDIGPQTLAYAAETEADLVELADLVQDIELEKRRIQRKMDRSRRAANPDNYAEDGTIKRGVKLTHNKSRRYLRLQKKLSHLQHCQAETRKRQHNELANHLLTLGDCFYIEKMNWTSLTHRAKKTEISEKTGKIKRKKRFGKSIANKAPGMLIEILKRKCLSRGLPKVAELPTTLKASQYNHLTKEYTKKSLSQRWNTMPDGKRIQRDLYSAFLLQHYNPQLQNFDQEALEKEYPQFVLLHDQAIERLSAIPKMPSSMGIRRSVS

SEQ ID NO: 1906 - protein, 307 aa, unidentified
  REGION 1..307: note = Category: MG81 effectors
  REGION 1..307: note = Description: MG81-184 effector
  source 1..307: note = uncultivated organism sequence
MAKCSTDTCCLTLPLRLEKWQEDRLAKRFEIARQIYNTMVRAELKKLRAMEQSEPYKANQEKIQALDWKTQADKQALKALYKERDKLLRNGGFSEYGFKSDIKNYYKHFNNNIGSNVAFHGIAPQVWAAFEKMLFKKEGKKVHFKKKGDIHSLRGYSAAGKSGGVEIIFRETYIEWKGLKLPLKLSPDNIYETQMLSYRVKYVRLLRKPGKRKDRWYAQLSLEGKPVIKYNPKTGEVRHPIGKGAVGLDIGPQTLAYSAATGADLVELANQVQNVEQEKRRLQRKLDRSRRAPTQVITRMMEPFDAE

SEQ ID NO: 1907 - protein, 528 aa, unidentified
  REGION 1..528: note = Category: MG81 effectors
  REGION 1..528: note = Description: MG81-185 effector
  source 1..528: note = uncultivated organism sequence
MAKNNNNNNNTDTCVLTLPLRVEKWQEDCLLKRFEAARRIYNSLLNFELKKLRQLERTVEYRQIQSVISSAYRSNTKDSPECKDAFKRRKKLTDENGISENGFKSDVKFFYKHFDGLIGSSVAVHCIAVQLWAAFDKYLSGSGKEIHFKRLGDISSLKGYSVKGKSGGLEIIFRGQYVEWTRKKKKLLLPLKIDPDNEYEREMLSRRVKYVRIIKKPGKNRLRWYAQLTLEGKPALKYSAETGKPIHSVGKGDVGIDIGPQTVAYASDKEVALLELADRVTNIEHQKKKLQRKLDRSRRATNPDNYKPDGTIKRGVKLTRNKSKRYLKLQSKLAYIQHRQAEIRKLQHTCLANHMLTLGDRFFVEKMNWPGLAHRAKETSFSEKTGRYKRKKRFGKSLANKAPAMFISILKRKCETLGLPGVVEVDTYNLKASQYNHLSDTYEKKSLSERWNYMPISDGSDSSKTKRIQRDLYSAFLLQHTIPQPCSFDKEALRIDYPNFVTMHDAEIHRLESLPKTVTSMGVRRSHS

SEQ ID NO: 1908 - protein, 427 aa, unidentified
  REGION 1..427: note = Category: MG81 effectors
  REGION 1..427: note = Description: MG81-186 effector
  source 1..427: note = uncultivated organism sequence
MKYYYQHFKENIGSSVAVHGIASQVWTAFEKVLFSKDGKMVHFKKKGELSSLRGYSQAGKSGGVEIIFRGSYVEWKGLKLPLKLSPDNDYETEMLSKRVKYVRILRQDGKTKPHWYAQLVLEGKPAIKRDPASGAPKHPVGHGAVGIDIGTRTLAYSADSKVDLIELADRVQNIEQEKLLLQRKLDRSRRATNPENYKPDGTIKKGVKLTRNKSKRYRKIQHQLAMLQHRQANIRKRQHNELANYLLTLGDCFFVEDMDYRALTRKAKKTEISEKTGRYKRKKRFGKSIANKAPSMLIALLDQKCKSLNLEGVKKVDTAVKASQYNHQTDECKAKELKERWNIMPDGERIQRDLYSAFLLQHCRRDLPEYNRKKLQETFGNEVYRVFDREALQRDYPKFVEYHRETIQRLSALPKTIASMGIRRIIS

SEQ ID NO: 1909 - protein, 480 aa, unidentified
  REGION 1..480: note = Category: MG81 effectors
  REGION 1..480: note = Description: MG81-187 effector
  source 1..480: note = uncultivated organism sequence
MPEYREIERLIEATTDKKEKWALKNQKKQFLRKNGINRNTFTTDMKRLYKHFNDNIGSNVAQHGIVSQVLTAFEKVYIENQSGEVHFKKPGDLRSVQGYSQKKSGGVEIMFREGKIIWNQQGNNDRKGVAREFPLKLSPDNSYEAEMLKKHVKFVRILRKEGKTKSHWYAQLVLEGKPTVKRDPISGAPKHPVGHGVVGIDIGTRTLAYSTDSEVNLLELADRVQNIEQEKRRLQRKMDRSRRAMNPENYNSDGTFKRGVKLTRNKSKRYRRIQHQLAMIQHHQEDIRKQQHNELANYLLTLGDCFFVENMSYCDLVHRANKTEISEKTGRYKRKKRFGKSIANKAPAMLITMLKQKCQSRGLEGVKEVDTHVRASQYNHQTDTCIEKALENRWNVMPDGERIQRDLYSAFLLQHCKQGLPEYDRKELKKEFGEELYRVFDREALQRDYPQFVAYHHMTIQRLSELPHTIPSMGIRRIIS

SEQ ID NO: 1910 - protein, 511 aa, unidentified
  REGION 1..511: note = Category: MG81 effectors
  REGION 1..511: note = Description: MG81-188 effector
  source 1..511: note = uncultivated organism sequence
MAKCSTDTCCLTLPLRLEKWQEDRLAKRFEIARQIYNTMVRAELKKLRAMEQSEPYKANQEKIQALDWKTQTDKQALKALYKERDKLLQDGGFSEYGFKSDIKNYYKHFNNNIGSNVAFHGIAPQVWAAFEKMLFKKEGKKVHFKKKGDIHSLRGYSAAGKSGGVEIIFRETYIEWKGLKLPLKLSPDNIYETQMLSYRVKYVRLLRKPGKCKDRWYAQLSLEGKPVIKYNPKTREVRHPIGKGAVGLDIGPQTLAYSAATGADLVELANQVQNVEQEKRRLQRKLDRSRRATNPGNYADDGTIRRGIALTHNKSKRYLRTQQELKYLQHQQAEIRKRQHTELANHLLSLGDCFYVEKMVWTSLTHRAKETEISEKTGKIKRKKRFGKSVANKAPATLIGILQRKSAALGIPGVIEVPTSVKASQYNHQSGTYTPKPLSQRWNNMPDGERIQRDLYSAFLLQHYDPQTNTFDANSLHQDYPQFVQYHHDAVLRLYAMPKTPSSMGIKRSLR

SEQ ID NO: 1911 - protein, 1387 aa, unidentified
  REGION 1..1387: note = Category: MG81 effectors
  REGION 1..1387: note = Description: MG81-189 effector
  source 1..1387: note = uncultivated organism sequence
MKLTKVEKARIAVSREKKDSGRIILYTNPEDVKKTSVTTMEQQVSKRIDQANKLYQVFFKSVIPVELNKHFAEISKIAAKCRNTEEFYKKACGYSGYEWTDAKQKKRTSQISRFSYTSSGKNMYVVMDNFVKEYMVQIWQEKDFRNAAVKILCCICDGKKFASKLEKVKKESPDTLKKFIEISGKCEGNPFVDYDTSFLEKVFTLVISQMVKNCDRKSYEQDDKEKIKKSIQKEIQWLSHVQSVTERSFGREGKTYLLFKIRNPYATEERLQTVLIRMRKTLKRGRNRDIAIVLLQGLAQMNQVTFTDTVKHLYQEEEKAFCDFIDAVNRDYYRVNIVKSVRNMDVKVQPDLNDNSILKLSGLGNIKKEALSDTLLRYAASADESDQVLLDIKKLLFEYFLPENSKETSKYTTVQNLWNIPYLPKIFFDYGFENEDFDDDNECAEDIETLCDVEPQYKINQHSLKRRIRYVNYGKYLQMTKNESDRERRYWIHYIKEFVEKNYVDSGRTLSEKNCYASSMMLNCWKEIIRYLCGKYIDIGKAVFHFTNLTAMPKPKDKIIYGQLEEQYKKGISSFDYEAIKAEETLQRDIVQSVVAAAFAFSKSVIDETKMEECQETNKEDILFLSENVLGSLLKENTIKLILRFYGGESTVAQKEYFDQQEIVQEMISHLKSIRNENFHYLDGAKKDNPHKYASILWKNDEMAYQKLTKQRYYANNVGLFYRAEEIQELVQELYSQKNITEAQIPAFRTVLKRKDLPGYMEELGILFPDNTQEKSKGDFEGTLYFLMKEIYYRDFIVKDKAAAYFFKAVDQNKEQSKKEDKHTERAAENFHRYVKSLEKKYNKKEISFRTVCQYIMMEYNQQNTTKQETEIYKHFKMLISLCIRKAFGNYIKETYRFLFHPIYSKQQGEPEYLDTLELESGVKEKNYEWFTLAHFLHPVQLNHLVGDLKSYIQYREDILRRIVFAEQRVYADQQKEVQQKVKTAKEILEVLEFVREVSGRVSNEYTDYYENEEEYAEFLYQYIDFRRREGKSAFESLKYFCQNILDSGTVVDLYADTENPKVLRNIELTRMYAGSNVKIPEYEKITEDEIKMYYQEKNSVALILSRGLCRNEKEQKKVIEFNWKKKRLTLNEITDVFSLVNDLLGKMISFSYLRERDQMYLLLGFYYMALCAENKSENHLGWKGETLDKLESSDSKFDIGGGLVLYQIVSAFNFGSKLLYISEDGRWKMAGGAFPGKYGRFENDYNHRTSLSKVIRLFENESYEREIIYWRDYVDHMKYYVNQNQSIMEIYSAFYSKVLGYSAKLRKSVVFNLQAALEKHHINPECIWMTSDGKCADIKLMKNLESQKFTYKLAKREGEKTERKICMNALNENFLKTIRTSLEYKK

SEQ ID NO: 1912 - protein, 511 aa, unidentified
  REGION 1..511: note = Category: MG81 effectors
  REGION 1..511: note = Description: MG81-190 effector
  source 1..511: note = uncultivated organism sequence
MAKCSTDTCCLTLPLRLEKWQEDRLAKRFEIARQIYNTMVRAELKKLRAMEQSEPYKANQEKIQALDWKTQTDKQALKALYKERDKLLRDGGFSEYGFKSDIKNYYKHFNNNIGSNVAFHGIAPQVWAAFEKMLFKKEGKKVHFKKKGDIHSLRGYSAAGKSGGVEIIFRETYIEWKGLKLPLKLSPDNIYETQMLSYRVKYVRLLRKPGKRKDRWYAQLSLEGKPVIKYNPKTGEVRHPIGKGAVGLDIGPQTLAYSAATGADLVELANQVQNVEQEKRRLQRKLDRSRRATNPGNYADDGTIRRGIALTHNKSKRYLRTQQELKYLQHQQAEIRKRQHTELANHLLSLGDCFYVEKMVWTSLTHRAKETEISEKTGKIKRKKRFGKSVANKAPATLIGILQRKSAALGIPGVIEVPTSVKASQYNHQSGTYTPKPLSQRWNNMPDGERIQRDLYSAFLLQHYDPQTNTFDANSLHQDYPQFVQYHHDAVLRLYAMPKTPSSMGIKRSLH

SEQ ID NO: 1913 - protein, 512 aa, unidentified
  REGION 1..512: note = Category: MG81 effectors
  REGION 1..512: note = Description: MG81-191 effector
  source 1..512: note = uncultivated organism sequence
MKKSSTDTCCLTLPLKLEKWQEDRLAKRFEIARQLYNTLVHAELKRLVQIKRTAEYLENEQKIRALDRNNPADRAKLQELYKEQRKSLKTAGFTDYSFTTDMGKYYKHFRDNIGSSVAVHGIAPQVWAAFDKVLFKKGGKKVHYKRPGEVNSVQGYSRTGKSGGREIMFRGAYIEWKGLKLPLKLSPDNAYETDMLQRRVKLVRLVRRPGKRRDRWYAQLVLEGKPAIKADPVTGKAVHPIGSGPIGLDIGPQTLAYSAAGVAGLVELADRVQNIEQEKRRLQRKMDRSRRATNPDNYAEDGTIRRGVKLTHNKSKRYRRNQQELKYLQHRQAEIRKLQHIQFANHLLSLGDHFYVEKMEWSSLTHRAKETVISEKTGKPRSKRRFGKSIANKAPAMLIEILRQKCKSLGLSDVVEINPADIKAIQYNHLTGKYVKKSLSRRWNDMQDGEHLQRDLYSAFLLQHYDSCSKTLDHDSIVRDYPAFVQYHHREIERLHALPKTPSSMGIRRSIA

SEQ ID NO: 1914 - protein, 511 aa, unidentified
  REGION 1..511: note = Category: MG81 effectors
  REGION 1..511: note = Description: MG81-192 effector
  source 1..511: note = uncultivated organism sequence
MAKCSTDTCCLTLPLRLEKWQEDRLAKRFEIARQIYNTMVRAELKKLRAMEQSEPYKANQEKIQALDWKTQTDKQALKALYKERDKLLQDGGFSEYGFKSDIKNYYKHFNNNIGSSVAVHGIAPQVWAAFEKMLFKKEGKKVHFKKKGDIRSLRGYSVTGKSGGVEIIFRETYIEWKGLKLPLKLSPDNIYETQMLSYRVKYVRLLRKPGKRKDRWYAQLSLEGKPVIKYNPKTGEVRHPIGKGAVGLDIGPQTLAYSAATGADLVELANQVQNVEQEKRRLQRKLDRSRRATNPGNYADDGTIRRGIALTHNKSKRYLRTQQELKYLQHQQAEIRKRQHTELANHLLSLGDCFYVEKMVWTSLTHRAKETEISEKTGKIKRKKRFGKSVANKAPATLIGILQRKSAALGIPGVIEVPTSVKASQYNHQSGTYTPKPLSQRWNNMPDGERIQRDLYSAFLLQHYDPQTNTFDANSLHQDYPQFVQYHHDAVLRLYAMPKTPSSMGIKRSLR

SEQ ID NO: 1915 - protein, 526 aa, unidentified
  REGION 1..526: note = Category: MG81 effectors
  REGION 1..526: note = Description: MG81-193 effector
  source 1..526: note = uncultivated organism sequence
MAKKNNNDTDTCVLTLPLRVEKWQEDCLLKRFEAARRIYNSLLNFELKKLRQLERTVEYRQIQSVISSAYRSNTKDSPECKDAFKRREKLISANGISEYGFKSDVKFFYKHFDSLIGSSVAVHCIAVQLWAAFDKYLSGSGKEIHFKRLGDISSLKGYSVKGKSGGCEIIFRGQYVEWTRKKKKLLLPLKIDPDNEYEREMLSRRVKYVRIIKKPGKNRLRWYAQLTLEGKPALKYSAETGKPIHSVGNGNVGIDIGPQTIAYASDKEVALLELADRVTNIEHQKKKLQRKLDRSRRATNPDNYKPDGTIKRGVKLTRNKSKRYLKLQSKLAYIQHRQAEIRKLQHTCLANHMLTLGDRFFVEKMNWSGLAHRAKETSISEKTGRYKRKKRFGKSLANKAPAMFISILKRKCETLGLPGVVEVDTYSLKASQYNHLSDTYEKKSLSERWNYMPISDGSDSSKTKRIQRDLYSAFLLQHTIPQPCSFDKEALRIDYPNFVIMHDAEIHRLESLPKTVTSMGVRRSHS

SEQ ID NO: 1916 - protein, 511 aa, unidentified
  REGION 1..511: note = Category: MG81 effectors
  REGION 1..511: note = Description: MG81-194 effector
  source 1..511: note = uncultivated organism sequence
MAKCSTDTCCLTLPLRLEKWQEDRLAKRFEIARQIYNTMVRAELKKLRAMEQSEPYKANQEKIQALDWKTQADKQALKALYKERDKLLQDGGFSERGFKSDIKNYYKHFNNNIGSNVAFHGIAPQVWAAFEKMLFKKEGKKVHFKKKGDIHSLRGYSAAGKSGGVEIIFRETYIEWKGLKLPLKLSPDNIYETQMLSYRVKYVRLLRKPGKRKDRWYAQLSLEGKPVIKYNPKTGEVRHPIGKGAVGLDIGPQTLAYSAATGADLVELANQVQNVEQEKRRLQRKLDRSRRATNPGNYADDGTIRRGIALTHNKSKRYLRTQQELKYLQHQQAEIRKRQHTELANHLLSLGDCFYVEKMVWTSLTHRAKETEISEKTGKIKRKKRFGKSVANKAPATLIGILQRKSAALGIPGVIEVPTSVKASQYNHQSGTYTPKPLSQRWNNMPDGERIQRDLYSAFLLQHYDPQTNTFDANSLHQDYPQFVQYHHDAVLRLYAMPKTPSSMGIKRSLR

SEQ ID NO: 1917 - protein, 535 aa, unidentified
  REGION 1..535: note = Category: MG81 effectors
  REGION 1..535: note = Description: MG81-195 effector
  source 1..535: note = uncultivated organism sequence
MGEMENIGNFVVTFEINVDKSQTDIIDKKLEVLRRMYNSIVGTFNSRHKEMIKTKRWRVMTSELFQSEKRTELHAQRKEFEKDSDDYNRITEEINLLKGKLSSERKKELTDTQKEILKENEFSEWGIYGTKGSGVGWKQYNHYKKCGIYSNNTMKLCSNIWRAYEKLLFGKGKRVSFKKYGELNTIQGANNKSAIVIRFDDNKKPYVVFDKLNIKIHFNPKKPYEFDAMYNRDIVCSTILRKQIRGKQKYYIQITFKGRPFSKENQQIGIGNVGIDIGTQTIAVTSDNSVMLKELANRTPKYEKEIRVLLRAMDRSRRSTNPQNYNDDGTIKRGIKLQWNVSKNYVKLKLKHKELARKKSEITTLQHNELSNEIISQGDVFKVEKMSFTSLTKRTKKTEVSEITGKFKRKKRFGKSIGNKAPSKLLSILKNKVIAKGGKFIEVNTQKCRASQYNHISDDYTKKSLSQRWNNFTIDENKIKIQRDIYSSFLIKNVNEDNETFNKEKIIEEFSNFIKLHNNEIEILKNTKNISSIGI

SEQ ID NO: 1918 - protein, 512 aa, unidentified
  REGION 1..512: note = Category: MG81 effectors
  REGION 1..512: note = Description: MG81-196 effector
  source 1..512: note = uncultivated organism sequence
MKKSNTDTCCLTLPLKLGKWQEDRLAKRFEIARQLYNTLVHAELKRLAQVKQTAEYRENERKIRTLDWNDPGDQAKLKGLYKERRKSLKTAGFTDYSFTTDMGKYYKHFRDNIGSNVALHGIAPQVWAAFDKLLFKKGGKKVHYKKPGEVNSVQGYSRTGKSGGTEIMFREPYIEWKGLKLPLKLSPDNAYETDMLQRRVKLVRLVRRPGKRRDRWYAQLVLEGKPAIKADPVTGKAVHPIGSGPVGLDIGPQTLAYSAAGVAGLVELADRVQNIEQEKRRLQRKMDRSRRATNPDNYAEDGTIRRGVKLTHNKSKRYRRNQQELKYLQHRQAEIRKLQHIQLANHLLSLGDHFYVEKMEWSSLTHRAKETVISEKTGKPRSKRRFGKSIANKAPAMLIEILRQKCKSLGLSDVVEINPADIKASQYNHLTGKYVKKSLSRRWNDMQDGEHLQRDLYSAFLLQHYDSCSKTLDLDSLARDYPAFVQYHHREIERLHALPKTPSSMGIRRSIA

SEQ ID NO: 1919 - protein, 348 aa, unidentified
  REGION 1..348: note = Category: MG81 effectors
  REGION 1..348: note = Description: MG81-197 effector
  source 1..348: note = uncultivated organism sequence
MILVYRYRVKSLNGLLNKQARAVSYVWNFSNETQKHALKWNKRWPTGFDLNKLTTGSSRELGLHSGTVNAVCEQYAKSRKQHKRPYLRWRGKKSLGWVPIKGRDIKETPNGFHFHGREFKAFKSRNIPIGAKIKDGTSFSQDARGNWFLNVCIEVADVAVRAIRAGVGIDLGLKSFATLSTGEVIDNPRIFRSLEERIGKAQRGKKKRLAANLHTKVKNTRGDFLHKLSSRITKEFDYIAVGNVNAAGLAKTSMAKSVNDAGWSSFRRQLAYKAIRHGATFDEVDEKWTTQTCDACGVIAGPKGRAGLNERQWICVCGVKHDRDVNAALNILRSGSGHRAPVEGIPVL

SEQ ID NO: 1920 - protein, 522 aa, unidentified
  REGION 1..522: note = Category: MG81 effectors
  REGION 1..522: note = Description: MG81-198 effector
  source 1..522: note = uncultivated organism sequence
MKKSSTDTCCLTLPLKLEKWQSDRLEKRFEIGRQIYNTVVRAELKKLQQVERTPQYREIEQKLKEAKQEEAKELWKKRTQLLSKSGFSEYGFKSDMKYYYQHFKENIGSSVAVHGIASQVWTAFEKVLFSKDGKMVHFKKKGELSSLRGYSQAGKSGGIEIIFRGSYVEWKGLKLPLKLSPDNDYETEMLSKRVKYVRILRKDGKTKTHWYAQLALEGKPAVKRDSISGAPKHPIGHGVVGIDIGTRTLAYSADSKVDLIELADRVQNIEQEKMLLQRKLDRSRRATNPENYKPDGTIKKGVKLTRNKSKRYRKIQHQLAMLQHRQADIRKRQHNELANYLLTLGDCFFVEDMDYRALTRKAKKTEISEKTGRYKRKKRFGKSIANKAPSMLIALLDQKCKSLNLEGVKKVDTAVKASQYNHQTDECKAKELKERWNIMPDGERIQRDLYSAFLLQHCRRDLPEYNRKKLQETFGNELYRVFDREALQRDYPKFVEYHRETIQRLSALPKTIASMGIRRSIS

SEQ ID NO: 1921 - protein, 480 aa, unidentified
  REGION 1..480: note = Category: MG81 effectors
  REGION 1..480: note = Description: MG81-199 effector
  source 1..480: note = uncultivated organism sequence
MPEYREIERLIEATTDKKEKWALKNQKKQFLRKNGINRNTFTTDMKRLYKHFNDNIGSNVAQHGIVSQVLTAFEKVYIENQSGEVHFKKPGDLRSVQGYSQKKSGGVEIMFREGKIIWNQQGNNDRKGVAREFPLKLSPDNSYEAEMLKKHVKFVRILRKEGKTKPHWYAQLVLEGKPTVKRDPISGAPKHPVGHGVVGIDIGTRTLAYSTDSEVNLLELADRVQNIEQEKRRLQRKMDRSRRAMNPENYNSDGTFKRGVKLTRNKSKRYRRIQHQLAMIQHHQADIRKQQHNELANYLLTLGDCFFVENMSYCDLVHRANKTEISEKTGRYKRKKRFGKSIANKAPAMLITMLKQKCQSRGLEGVKEVDTHVRASQYNHQTDTCIEKALENRWNVMPDGERIQRDLYSAFLLQHCKQGLPEYDRKELKKEFGEELYRVFDREALQRDYPQFVAYHHMTIQQLSELPHTIPSMGIRRIIS

SEQ ID NO: 1922 - protein, 512 aa, unidentified
  REGION 1..512: note = Category: MG81 effectors
  REGION 1..512: note = Description: MG81-200 effector
  source 1..512: note = uncultivated organism sequence
MGKSSTDTCCLSLPLKLEKWQEDRLAKRFEIARQIYNTLVHAELKRLSQVKRSQQYREIENKIRALDRNDQEDKKELSLLYKLRDDLLRKSGFNDYGFKADIKYFYKHFGENIGANVAVHGIAPQVWSAFDSVLFKKRGKKVHYKKPGDICSLRGYSVTGKSGGSEIMFRGTYIEWKGLKMPLKLSPDNIYESEMLDHRVKYVRIVRKPGKRKDRWYAQLSLECKPVIKCDPVSGEMRHPVGKGPVGLDIGPQTLAYCALSEAGLVELADQVQDIEREKQRLQRRLDRSRRAANPNNYAADGTIKRGVKLTHNKSKRYCILQRELRYLQQQQAETRKRQHTELANYLLSLGDRFYVEDMNWSSLARRAKKTEISEKTGRYKRKKRFGKSIANKAPGSLIDILKQKCESLGIPGVEKLPTSLLKASQYNHQTGEYTPKPRSQRWNDMPDGERIQRDLYSAFLLQHYDPVSKGYDQAALQRDYPQFLQHHHHSIQRLTAKPKTPPSMGIHQRLR

SEQ ID NO: 1923 - protein, 579 aa, unidentified
  REGION 1..579: note = Category: MG81 effectors
  REGION 1..579: note = Description: MG81-201 effector
  source 1..579: note = uncultivated organism sequence
MAFGNKNSTPSFVLTLPIKVTKQDEIFLSKKFRVGCTVYNQMVTKTTKMWHQLRKTREYKNLIKAIKAAPANSDERKALLVQRSNLIKQAGFSEGAFHKLVVPYQKAYNVNCDVAQKVASAVWKAWGDFFYGKGKTVHYKRLDDFVTLSGKKNTNGIVFRPANHTVSSLESAKRKAKSSVEKKYFDAYRKLNAKKDEEVVLPDEVKAQMDKEVAAAVAKIKPCIGDGNLRIIYGKHEFLVKLRNPDTQTGRYQQEALKCGVKYCRIVRSWVGTKWKYYAQLVLEGYPPIKCDSNGVAKHPVEQGRIGVDIGTQTIAFCGKDVCDLRVLAPSAVVEARNGLTKEIARVMRQMDRSRRAMNPQYFNENGTVKRLKCKNGHKQIRHWNYSKNYYRLLHKLRDLNRKLAAVRKTEHYILANELLTYGNEFVVEDMNYKALQKRSKKTKINPKTGRARSKKRFGKSIGRCAPAMFISILNQKANRYGGSVIKVSTFETKASQFDHTDDSYTKKKLSQRFAKLSDGTVVQRDMYSAFLLLHLRKNLQSYNKKTIKKDFPLFKKLHDETKERLQNSHEWLPASVGF

SEQ ID NO: 1924 - protein, 353 aa, unidentified
  REGION 1..353: note = Category: MG81 effectors
  REGION 1..353: note = Description: MG81-202 effector
  source 1..353: note = uncultivated organism sequence
MSGKSGGTEIIFHKTYIAWKGLTLPLKLSPDNAYEKEMLMRRIKYVRILRKPGKHKDRWYAQLSLEGNPVVKLDPVSGLPRHPIGKGAVGIDIGPQTLAYSAEGGADLVELADQVQCIEQEKSRLQRKMDRSRRASNPDNYAQDGTIKRGVKLTHNKSRRYCKLQKELAYMLYRQAETRKRQHRELINRLLTMGDCFYIEDMHWNSLAHRAKKTEISEKTGRYKRKKRFGKSIANKAPAMLVDMLEQKCKSLELDVVMVNTSLKASQYNHQTGKYEKKTLSQRWNHMPDGEQIQRDLYSAFLLQHVVPEKNAFDNEALCRDYPKFVQYHHEVIERLRSLPKTISSMGIRRSVS

SEQ ID NO: 1925 - protein, 528 aa, unidentified
  REGION 1..528: note = Category: MG81 effectors
  REGION 1..528: note = Description: MG81-203 effector
  source 1..528: note = uncultivated organism sequence
MAKNNNNNNNTDTCVLTLPLRVEKWQEDCLLKRFEAARRIYNSLLNFELKKLRQLERTVEYRQIQSVISSAYRSNTKDSPECKDAFKRREKLISANGISENGFKSDVKFFYKHFDGLIGSNVAVHCIAVQLWAAFDKYLSGSGKEIHFKRLGDISSLKGYSVKGKSGGCEIIFRGQYVEWTRKKKKLLLPLKIDPDNEYEREMLSRRVKYVRIIKKPGKNRLRWYAQLTLEGKPALKYSAETGKPIHSVGKGNVGIDIGPQTVAYASDKEVALLELADRVTNIEHQKKKLQRKLDRSRRATNPDNYKPDGTIKCGVKLTRNKSKRYLKLQSKLAYIQHRQAEIRKLQHTCLANHMLTLGDRFFVEKMNWPGLAHRAKETSISEKTGRYKRKKRFGKSLANKAPAMFISILKRKCETLGLPGVVEVDTFRLRASQYNHLSDTYEKKSLSERWNYMPISDGSDSSKTKRIQRDLYSAFLLQHTIPQPCSFDKEALRIDYPNFVIMHDAEIHRLESLPKTITSMGVRRSHS

SEQ ID NO: 1926 - protein, 527 aa, unidentified
  REGION 1..527: note = Category: MG81 effectors
  REGION 1..527: note = Description: MG81-204 effector
  source 1..527: note = uncultivated organism sequence
MAKNNNNNNTDTCVLTLPLRVEKWQEDCLLKRFEAARRIYNSLLNFELKKLRQLERTVEYRQIQSVISSAYRSNTKDSPECKDAFKRREKLISANGISENGFKSDVKFFYKHFDGLIGSNVAVHCIAVQLWAAFDKYLSGSGKEIHFKRLGDISSLKGYSVKGKSGGCEIIFRGQYVEWTRKKKKLLLPLKIDPDNEYEREMLSRRVKYVRIIKKPGKNRLRWYAQLTLEGKPALKYSAETGKPIHSVGKGNVGIDIGPQTVAYASDKEVALLELADRVTNIEHQKKKLQRKLDRSRRATNPDNYKPDGTIKCGVKLTRNKSKRYLKLQSKLAYIQHRQAEIRKLQHTCLANHMLTLGDRFFVEKMNWPGLAHRAKETSISEKTGRYKRKKRFGKSLANKAPAMFISILKRKCETLGLPGVVEVDTFRLRASQYNHLSDTYEKKSLSERWNYMPISDGSDSSKTKRIQRDLYSAFLLQHTIPQPCSFDKEALRIDYPNFVIMHDAEIHRLESLPKTITSMGVRRSHS

SEQ ID NO: 1927 - protein, 512 aa, unidentified
  REGION 1..512: note = Category: MG81 effectors
  REGION 1..512: note = Description: MG81-205 effector
  source 1..512: note = uncultivated organism sequence
MPTKQKEGGNRCVLTLPLLTEPWQEHIIEKRFKIIEHLKNQLISIELRKLKNLQRTKAYKNLIKQIEFVPKSERTALYKERNKMLKDAGFSQYTFMDDMAGKKSLMQKHFESHINVQIAHKAAIDVWSSFEKFLFGSGQMIHYQKRGTLSSVASKSPKTGMFYYSDENIFKWSGGGTKPKGGIILCLRVASVKTNYEKEMVANNEIKYYRVVRKWMKTKYKYYLQITFAGKPADKHREISTGRVGIDIGTQTIAIASDKSVKLLELADKVNKNHIKKCELQRKLDRSRRYTNPDNFNPDGTVKRGTKGHKLKWNKSKHYIEIAGKIRELERKNADIRKYQHTCLANDILAMGNQIYIEPMNYKGLQKRAKETQVDEKGRYKKKKRFGKSLANKAPAMFVTILKTKAEQHGGEVYEVDIMSYRASQCDHTTGEYTKHGLNDRWRILGNGDKVQRDLYSAFLIKNSNKTHDEIDLDKCSKTYDNFKKLHDKEIENIRNEVKLRERRNISSYGIA

SEQ ID NO: 1928 - protein, 512 aa, unidentified
  REGION 1..512: note = Category: MG81 effectors
  REGION 1..512: note = Description: MG81-206 effector
  source 1..512: note = uncultivated organism sequence
MPTKQKEDSNRCVLTLPLLTEPWQEHIIEKRFKIIEHLKNQLISIELRKLKKLQRTKAYKNLIKQIESVPKSERTALYKERNKMLKDAGFSQYTFMDDMAGKKSLMQKHFESHINVQIAHKAAIDVWSSFEKFLFGSGQMIHYQKRGTLSSVASKSPKTGMFYYPDENIFKWSGGGTKPKGGIILCLRVASVKTNYEKEMVANNEIKYYRVVRKWMKTKYKYYLQITFAGKPADKHREISTGRVGIDIGTQTIAIASDKSVKLLELADKVNKNHIKKCELQRKLDRSRRYTNPDNFNPDGTVKRGTKGHKLKWNKSKHYLEIAGKIRELERKNADIRKYQHTCLANDILAMGNQIYIEPMNYKGLQKRAKETQVDEKGRYKKKKRFGKSLANKAPAMFVTILKTKAEQHGGEVYEVDIMSYRASQCDHTTGEYTKHGLNDRWRILGNGDKVQRDLYSAFLIKNSNKTHDEIDLDKCSKTYDNFKKLHDKEIENIRNEVKLRERKNISSYGIA

SEQ ID NO: 1929 - protein, 531 aa, unidentified
  REGION 1..531: note = Category: MG81 effectors
  REGION 1..531: note = Description: MG81-207 effector
  source 1..531: note = uncultivated organism sequence
MILLANNNNNNNNTDTCVLTLPLRVEKWQEDCLLKRFEAARRIYNSLLNFELKKLRQLERTVEYRQIQSVISSAYRSNTKDSPECKDAFKRREKLISANGISEYGFKSDVKFFYKHFDGLIGSSVAVHCIAVQLWAAFDKYLRGSGKEIHFKRLGEISSLKGYSVKGKSGGLEIIFRGQYIEWTRKKKKLLLPLKIDPDNEYEREMLSRRVKYVRIIKKPGKNRLRWYAQLTLEGKPALKYSAETGKPIHSVGKGNVGIDIGPQTVAYASDKEVALLELADRVTNIEHQKKKLQRKLDRSRRATNPDNYKPDGTIKRGVKLTRNKSKRYLKLQSKLAYIQHRQAEIRKLQHTCLANHMLTLGDRFFVEKMNWPGLAHRAKETSISEKTGRYKRKKRFGKSLANKAPAMFISILKRKCETLGLPGVVEVDTYNLKASQYNHLSDTYEKKSLSERWNYMPISDGSDSSKTKRIQRDLYSAFLLQHTIPQPCSFDKEALRIDYPNFVTMHDAEIHRLESLPKTVTSMGVRRSHS

SEQ ID NO: 1930 - protein, 538 aa, unidentified
  REGION 1..538: note = Category: MG81 effectors
  REGION 1..538: note = Description: MG81-208 effector
  source 1..538: note = uncultivated organism sequence
MNNEEKEKEGATCCLTLPLKLEKWQSDHLEKRFEIARQLYNTLVHAELKKKCQVERMPEYQEIMKMIDAASNQKEKWALEKKRKAFLEENGFSRNAFKADMEKYYKHFNDNIGANVALHGITAQVWIAFDKVFVDNYKQKGKVHFKKPGELCSVQGYSQKKSGGKEIMFREDRIIWNQQGNRDRKKVKREFLLKLSPDNPYEAEMLKRHVKFVRILRKDGKTKPHWYAQLVLEGKPAVKRDPISSAPKHPVGHGVVGIDIGTRTLAYSTDKEVNLLELADRVQNIEQEKRRLQRKMDRSRRAMNPENYNSDGTFKRGVKLTRNKSKRYRRIQHQLAMIQHHQADIRKQQHNELANYLLTLGDCFFVENMSYCDLVHRANKTEISEKTGRYKRKKRFGKSIANKAPAMLITMLKQKCQSRGLEGVKEVDTHVRASQYNHQTDTCIEKALENRWNVMPDGERIQRDLYSAFLLQHCKQGLPEYNRKELKKEFGEELYRVFDREALQRDYPQFVAYHHMTIQRLSELPHTIPSMGIRRIIS

SEQ ID NO: 1931 - protein, 511 aa, unidentified
  REGION 1..511: note = Category: MG81 effectors
  REGION 1..511: note = Description: MG81-209 effector
  source 1..511: note = uncultivated organism sequence
MKKSNTDTCCLTLPLKLEKWQEDRLAKRFEIARQIYNTMVHAELKKLRNIENSQPYRQIQKQIEALNWKNQNDKARLKSLYNDRNKLLNTIGFSEYGFKADIKYYYKHFNDNIGSSVAVHGIAPQVWAAFEKMLFHKEGKKVHYKKKDDIHSLHGYSVTGKSGGVEIIFRKTYIEWKGLKLPLKRSPDNAYETEMLGRRVKYVRLLRKPGKRKDCWYAQLSLEGKPAIKRDPESGERRHSIGRGAVGLDIGPQTLAYSACGAADLVELADQVQNIEQMKRRLQRKLDRSRRATNPDNYADNGTIRRGVKLTHNKSNRYRRTQRELRYLQHCQAEIRKRQHIELANHLLALGDCFYVEDMAWPSLTHRAKETAISEKTGRIKRKKRFGKSVANKAPATLIGILEQKCNSLGLPGVMKVPTSLRASQYNHQSGEYTSKPLSQRWNNMPDGERIQRDLYSAFLLQHYDPKAGNFDSALLQQDYPQFVQYHHRAIQRLSTVPKTLSSMGIQRSLR

SEQ ID NO: 1932 - protein, 538 aa, unidentified
  REGION 1..538: note = Category: MG81 effectors
  REGION 1..538: note = Description: MG81-210 effector
  source 1..538: note = uncultivated organism sequence
MILLANNNNNNNNNNNNNNNTDTCVLTLPLRVEKWQEDCLLKRFEAARRIYNSLLNFELKKLRQLERTVEYRQIQSVISSAYRSNTKDSPECKDAFKRREKLISANGISEYGFKSDVKFFYKHFDGLIGSSVAVHCIAVQLWAAFDKYLRGSGKEIHFKRLGEISSLKGYSVKGKSGGLEIIFRGQYVEWTRKKKKLLLPLKIDPDNEYEREMLSRRVKYVRIIKKPGKNRLRWYAQLTLEGKPALKYSAETGKPIHSVGKGDVGIDIGPQTVAYASDKEVALLELADRVTNIEHQKKKLQRKLDRSRRATNPDNYKPDGTIKRGVKLTRNKSKRYLKLQSKLAYIQHRQAEIRKLQHTCLANHMLTLGDRFFVEKMNWPGLAHRAKETSISEKTGRYKRKKRFGKSLANKAPAMFISILKQKCETLGLPGVVEVDTFRLKASQYNHLSDTCEKKSLSERWNYMPISDGSDSSKTKRIQRDLYSAFLLQHTIPQSCSFDKEALRIDYPNFVTMHDAEIHRLESLPKTITSMGVRRSHS

SEQ ID NO: 1933 - protein, 528 aa, unidentified
  REGION 1..528: note = Category: MG81 effectors
  REGION 1..528: note = Description: MG81-211 effector
  source 1..528: note = uncultivated organism sequence
MILLAKNNNNTDTCVLTLPLRVEKWQEDCLLKRFEAARRIYNSLLNFELKKLRQLERTVEYRQIQSVISSAYRSNTKDSPECKDAFKRREKLISANGISEYGFKSDVKFFYKHFDGLIGSNVAVHCIAVQLWAAFDKYLRGSGKEIHFKRLGDISSLKGYSVKGKSGGCEIIFRGQYIEWTRKKKKLLLPLKIDPDNEYEREMLSRRVKYVRIIKKPGKNRLRWYAQLTLEGKPALKYSAETGKPIHSVGKGNVGIDIGPQTVAYASDKEVALLELADRVTNIEHQKKKLQRKLDRSRRATNPDNYKPDGTIKRGVKLTRNKSKRYLKLQSKLAYIQHRQAEIRKLQHTCLANHMLTLGDRFFVEKMNWPGLAHRAKETSISEKTGRYKRKKRFGKSLANKAPAMFISILKRKCETLGLPGVVEVDTYSLKASQYNHLSDTYEKKSLSERWNYMPISDGSDSSKTKRIQRDLYSAFLLQHTIPQPCSFDKKALRIDYPNFVTMHDAEIHRLESLPKTITSMGVRRSHS

SEQ ID NO: 1934 - protein, 511 aa, unidentified
  REGION 1..511: note = Category: MG81 effectors
  REGION 1..511: note = Description: MG81-212 effector
  source 1..511: note = uncultivated organism sequence
MGKSSTDTCCLTLPLKLEKWQEDRLAKRFEIARQIYNTMVRAELKKLDRVKQLPEYRKNQKEIQALDWKNSADKQRLKELYGNQRKILQKQGFTEYGFKSDSKDYYKHFIENIGSSVATHGIAPQVWNAFDKMLFQKDGKVVHFKRYGDVHSLKGGSVTNKSGGAEIMFRKTYIEWKGLKLPLKLSPNNAYEAEMLSYRVKYVRILRTRGKTKDRWYAQLSLEGKPAVKYDSSTGKPVHPVGRGAVGLDIGPQTLAYAAANEANLVELADQVQNIEQEKRRLQRKLDRSRRATNPDNYNENGTIRRGVKLTHNKSKRYCKLQKELSWIQHYQAETRKRQHIALANHLLSLGDCFYVEPMAWPSLTHRAKKTEVSEKTGRIKRKKRFGKSVANKAPASLIGILKLKCISLGLTGVVEVPMLLKASQYNHQSKDYAPKSLSQRWNDMPDGNRIQRDLYSAFLLQHYDSRSESFDQETLERDYPQFVRLHNQTIQRLSALPKTPSSMGIRRSVS

SEQ ID NO: 1935 - protein, 528 aa, unidentified
  REGION 1..528: note = Category: MG81 effectors
  REGION 1..528: note = Description: MG81-213 effector
  source 1..528: note = uncultivated organism sequence
MILLTKNNNNTDTCVLTLPLRVEKWQEDCLLKRFEAARRIYNSLLNFELKKLRQLERTVEYRQIQSVISSAYRSNTKDSPECKDAFKRREKLISANGISENGFKSDVKFFYKHFDGLIGSNVAVHCIAVQLWAAFNKYLSGSGKEIHFKRLGEISSLKGYSVKGKSGGREIIFRGQYIEWTRKKKKLLLPLKIDPDNEYEREMLSRRVKYVRIIKKPGKNRLRWYAQLTLEGKPALKYSAETGKPIHSVGKGNVGIDIGPQTIAYASDKEVALLELADRVTNIEHQKKKLQRKLDRSRRATNPDNYKPDGTIKRGVKLTRNKSKRYLKLQSKLAYIQHRQAEIRKLQHTCLANHMLTLGDRFFVEKMNWPGLAHRAKETSISEKTGRYKRKKRFGKSLANKAPAMFISILKRKCETLGLPGVVEVDTFRLRASQYNHLSDTYEKKSLSERWNYMPISDGSDSSKTKRIQRDLYSAFLLQHTIPQPCSFDKEALRIDYPNFVIMHDAEIHRLESLPKTVTSMGVRRSHS

SEQ ID NO: 1936 - protein, 528 aa, unidentified
  REGION 1..528: note = Category: MG81 effectors
  REGION 1..528: note = Description: MG81-214 effector
  source 1..528: note = uncultivated organism sequence
MILLTKNNNNTDTCVLTLPLRVEKWQEDCLLKRFEAARRIYNSLLNFELKKLRQLERTVEYRQIQSVISSAYRSNTKDSPECKDAFKRREKLISANGLAEYGFKSDVKFFYKHFDGLIGSNVAVHCIAVQLWAAFNKYLSGSGKEIHFKRLGEISSLKGYSVKGKSGGREIIFRGQYIEWTRKKKKLLLPLKIDPDNEYEREMLSRRVKYVRIIKKPGKNRLRWYAQLTLEGKPALKYSAETGKPIHSVGKGNVGIDIGPQTIAYASDKEVALLELADRVTNIEHQKKKLQRKLDRSRRATNPDNYKPDGTIKRGVKLTRNKSKRYLKLQSKLAYIQHRQAEIRKLQHTCLANHMLTLGDRFFVEKMNWSGLAHRAKETSISEKTGRYKRKKRFGKSLANKAPAMFISILKRKCETLGLPGVVEVDTYSLKASQYNHLSDTYEKKSLSERWNYMPISDGSDSSKTKRIQRDLYSAFLLQHTIPQPCSFDKEALRIDYPNFVIMHDAEIHRLESLPKTVTSMGVRRSHS

SEQ ID NO: 1937 - protein, 561 aa, unidentified
  REGION 1..561: note = Category: MG81 effectors
  REGION 1..561: note = Description: MG81-215 effector
  source 1..561: note = uncultivated organism sequence
MSNLLFLLENEEKEKDGATCCLTLPLKLEKWQSDHLEKRFEIARQLYNTLVHAELKRIHRIERMPEYREIERQIEATTDKKEKWALKNQKKQFLRKNGINRNTFTTDMKRLYKHFNDNIGSNVAQHGIVSQVLTAFEKVYIENQSGEVHFKKPGDLRSVQGYSQKESGGKEIMFRNGKIIWTQQENDDRKKSPKYQQRKKRQNYKGVKGIAREFPVVFSKNNPYEAEMLTKHVKFVRILRKDGKTKPHWYAQLVLEGTPVAKYDPISGAPKHPVGHGVVGIDIGTRTLAYSTDSEVNLLELADRVQNIEQEKRRLQRKMDRSRRAMNPENYNSDGTFKRGVKLTRNKSKRYRRIQHQLAMIQHHQADIRKQQHNELANYLLTLGDCFFVENMSYCDLVHRANKTEISEKTGRYKRKKRFGKSIANKAPAMLITMLKQKCQSRGLEGVKEVDTHVRASQYNHQTDTCIEKALENRWNVMPDGERIQRDLYSAFLLQHCKQGLPEYNRKELKKEFGEELYRVFDREALQRDYPQFVAYHHMTIQRLSELPHTIPSMGIRRIIS

SEQ ID NO: 1938 - protein, 531 aa, unidentified
  REGION 1..531: note = Category: MG81 effectors
  REGION 1..531: note = Description: MG81-216 effector
  source 1..531: note = uncultivated organism sequence
MILLANNNNNNNNTDTCVLTLPLRVEKWQEDCLLKRFEAARRIYNSLLNFELKKLRQLERTVEYRQIQSVISSAYRSNTKDSLECKDAFKRREKLISANGISENGFKSDVKFFYKHFDGLIGSNVAVHCIAVQLWAAFDKYLSGSGKEIHFKRLGDISSLKGYSVKGKSGGCEIIFRGQYVEWTRKKKKLLLPLKIDPDNEYEREMLSRRVKYVRIIKKPGKNRLRWYAQLTLEGKPALKYSAGTGKPIHSVGKGNVGIDIGPQTVAYASDKEVALLELADRVTNIEHQKKKLQRKLDRSRRATNPDNYKPDGTIKRGVKLTRNKSKRYLKLQSKLAYIQHRQAEIRKLQHTCLANHMLTLGDRFFVEKMNWPGLAHRAKETSISEKTGRYKRKKRFGKSLANKAPAMFISILKRKCETLGLPGVVEVDTYNLKASQYNHLSDTYEKKSLSERWNYMPISDGSDSSKTKRIQRDLYSAFLLQHTIPQPCSFDKEALRIDYPNFVIMHDAEIHRLESLPKTVTSMGVRRSHS

SEQ ID NO: 1939 - protein, 534 aa, unidentified
  REGION 1..534: note = Category: MG81 effectors
  REGION 1..534: note = Description: MG81-217 effector
  source 1..534: note = uncultivated organism sequence
MILLANNNNNNNNNNNTDTCVLTLPLRVEKWQEDCLLKRFEAARRIYNSLLNFELKKLRQLERTVEYRQIQSVISSAYRSNTKDSPECKDAFKRREKLISANGISENGFKSDVKFFYKHFDGLIGSNVAVHCIAVQLWAAFDKFLSGSGKEIHFKRLGDISSLKGYSVKGKSGGREIIFRGQYVEWTKKKKKLLLPLKIDPDNEYEREMLSRRVKYVRIIKKPGKNRLRWYAQLTLEGKPALKYSAETGKPIHSVGKGNVGIDIGPQTVAYASDKEVALLELADRVTNIEHQKKKLQRKLDRSRRATNPDNYKPDGTIKRGVKLTRNKSKRYLKLQSKLAYIQHRQAEIRKLQHTCLANHMLTLGDRFFVEKMNWPGLAHRAKETSISEKTGRYKRKKRFGKSLANKAPAMFISILKRKCETLGLPGVVEVDTYSLKASQYNHLSDTYEKKSLSERWNYMPISDGSDSSKTKRIQRDLYSAFLLQHTIPHPCSFDKEALRIDYPNFVIMHDAEIHRLESLPKTVTSMGVRRSHS

SEQ ID NO: 1940 - protein, 534 aa, unidentified
  REGION 1..534: note = Category: MG81 effectors
  REGION 1..534: note = Description: MG81-218 effector
  source 1..534: note = uncultivated organism sequence
MANNNNNNNNNNNNNNTDTCVLTLPLRVEKWQEDCLLKRFEAARRIYNSLLNFELKKLRQLERTVEYRQIQSVISSAYRSNTKDSPECKDAFKRREKLISANGISENGFKSDVKFFYKHFDGLIGSNVAVHCIAVQLWAAFDKYLSGSGKEIHFKRLGDISSLKGYSVKGKSGGREIIFRGQYVEWTRKKKKLLLPLKIDPDNEYEREMLSRRVKYVRIIKKPGKNRLRWYAQLTLEGKPALKYSAETGKPIHSVGKGNVGIDIGPQTVAYASDKEVALLELADRVTNIEHQKKKLQRKLDRSRRATNPDNYKPDGTIKRGVKLTRNKSKRYLKLQSKLAYIQHRQAEIRKLQHTCLANHMLTLGDRFFVEKMNWPSLAHRAKETSISEKTGRYKRKKRFGKSLANKAPAMFISILKRKCETLGLPGVVEVDTYSLKASQYNHLSDTYEKKSLSERWNYMPISDGSDSSKTKRIQRDLYSAFLLQHTIPQPCSFDKEALRIDYPNFVTMHDAEIHRLESLPKTITSMGVRRSHS

SEQ ID NO: 1941 - protein, 527 aa, unidentified
  REGION 1..527: note = Category: MG81 effectors
  REGION 1..527: note = Description: MG81-219 effector
  source 1..527: note = uncultivated organism sequence
MAKNNNNNNTDTCVLTLPLRVEKWQEDCLLKRFEAARRIYNSLLNFELKKLRQLERTVEYRQIQSVISSAYRSNTKDSPECKDAFKRREKLISANGISENGFKSDVKFFYKHFDGLIGSNVAVHCIAVQLWAAFDKYLSGSGKEIHFKRLGDISSLKGYSVKGKSGGGEIIFRGQYVEWTRKKKKLLLPLKIDPDNEYEREMLSRRVKYVRIIKKPGKNRLRWYAQLTLEGKPALKYSAETGKPIHSVGKGNVGIDIGPQTVAYASDKEVALLELADRVTNIEHQKKKLQRKLDRSRRATNPDNYKPDGTIKCGVKLTRNKSKRYLKLQSKLAYIQHRQAEIRKLQHTCLANHMLTLGDRFFVEKMNWPGLAHRAKETSISEKTGRYKRKKRFGKSLANKAPAMFISILKRKCETLGLPGVVEVDTFRLRASQYNHLSDTYEKKSLSERWNYMPISDGSDSSKTKRIQRDLYSAFLLQHTIPQPCSFDKEALRIDYPNFVIMHDAEIHRLESLPKTITSMGVRRSHS

SEQ ID NO: 1942 - protein, 540 aa, unidentified
  REGION 1..540: note = Category: MG81 effectors
  REGION 1..540: note = Description: MG81-220 effector
  source 1..540: note = uncultivated organism sequence
MMYNTKYQAKRGDPVGEKNNNDTDTCVLTLPLRVEKWQEDCLLKRFEAARRIYNSLLNFELKKLRQLERTVEYRQIQSVISSAYRSNTKDSPECKDAFKRRKKLTDENGISEYGFKSDVKFFYKHFDGLIGSSVAVHCIAVQLWAAFDKYLRGNGKEIHFKRLGDISSLKGYSVRGKSGGCEIIFRGQYVEWTRKKKKLLLPLKIDPDNEYEREMLSRRVKYVRIIKKPGKNRLRWYAQLTLEGKPALKYSAETGKPIHSVGKGNVGIDIGPQTVAYASDKEVALLELADRVTNIEHQKKKLQRKLDRSRRTTNPDNYKPDGTIKRGVKLTRNKSKRYLKLQSKLAYIQHRQAEIRKLQHTCLANHMLTLGDRFFVEKMNWPGLAHRAKETSISEKTGRYKRKKRFGKSLANKAPAMFISILKRKCETLGLPGVVEVDTYSLRASQYNHLSDTYEKKSLSERWNYMPISDGSDSSKTKRIQRDLYSAFLLQHTIPQPCSFDKEALRIDYPNFVTMHDAEIHRLESLPKTVTSMGVRRSHS

SEQ ID NO: 1943 - protein, 511 aa, unidentified
  REGION 1..511: note = Category: MG81 effectors
  REGION 1..511: note = Description: MG81-221 effector
  source 1..511: note = uncultivated organism sequence
MGKSSTNTCCLTLPLKLEKWQEDRLAKRFEIARQIYNTMVRAELKRLRQVEQSPQYRSNKKAIQALDWKNTADKPKLKTLYRERDKLLKGGGFTEYGFKSDIKNFYKHFAENIGSSVAVHGIAPQVWAAFERVLFKKEGKKVHFKKTGDIRSLRGYSVTGKSGGVEIIFRGSYIEWKGLNLPLKLSPDNAYETEMLSYRVKYVRILRKPGKTRDRWYAQLSLEGKPAIKRNPASGNPVHPVGQGAVGLDIGPQTLAYAAEKEANLVELADRVQNIEQEKHLLQRKMDRSRRAANPDNYAENGTIRRGVKLTHNKSKRYLRLQRELCYLQHCQAETRKRQHTELANHLLSLGSCFYVEDMAWPSLTHRAKKTEISDKTGRIKRKKRFGKSIANKAPAALINILRTKCVSLGIPGVVEVPTSLKASQYNHQSKEYTPKPLSQRWNDMPDGSRIQRDLYSAFLLQHYDPQSGNFDQASLEADYPQFVQLHNQSIQRLLTVPKTPSSMGIRRSVS

SEQ ID NO: 1944 - protein, 524 aa, unidentified
  REGION 1..524: note = Category: MG81 effectors
  REGION 1..524: note = Description: MG81-222 effector
  source 1..524: note = uncultivated organism sequence
MAKNNNTDTCVLTLPLRVEKWQEDCLLKRFEAARRIYNSLLNFELKKLRQLERTVEYRQIQSVISSAYRSNTKDSPECKDAFKRREKLISANGISENGFKSDVKFFYKHFDGLIGSSVAVHCIAVQLWAAFDKYLSGSGKEIHFKRLGDISSLKGYSVKGKSGGCEIIFRGQYVEWTRKKKKLLLPLKIDPDNEYEREMLSRRVKYVRIIKKPGKNRLRWYAQLTLEGKPALKYSAETGKPIHSVGKGNVGIDIGPQTVAYASDKEVALLELADRVTNIEHQKKKLQRKLDRSRRATNPDNYKPDGTIKRGVKLTRNKSKRYLKLQSKLAYIQHRQAEIRKLQHTCLANHMLTLGDRFFVEKMNWPGLAHRAKETSISEKTGRYKRKKRFGKSLANKAPAMFISILKRKCETLGLPGVVEVDTFRLRASQYNHLSDTYEKKSLSERWNYMPISDGSDSSKTKRIQRDLYSAFLLQHTIPQPCSFDKEALRIDYPNFVIMHDAEIHRLESLPKTITSMGVRRSHS

SEQ ID NO: 1945 - protein, 526 aa, unidentified
  REGION 1..526: note = Category: MG81 effectors
  REGION 1..526: note = Description: MG81-223 effector
  source 1..526: note = uncultivated organism sequence
MAKKNNNDTDTCVLTLPLRVEKWQEDCLLKRFEAARRIYNSLLNFELKKLRQLERTVEYRQIQSVISSAYRSNTKDSPECKDAFKRREKLISANGISEYGFKSDVKFFYKHFDGLIGSSVAAHCIAVQLWAAFDKYLRGSGKEIHFKRLGEISSLKGYSVKGKSGGLEIIFRGQYVEWTRKKKKLLLPLKIDPDNEYEREMLSRRVKYVRIIKKPGKNRLRWYAQLTLEGKPALKYSAETGKPIHSVGKGDVGIDIGPQTVAYASDKEVALLELADRVTNIEHQKKKLQRKLDRSRRATNPDNYKPDGTIKRGVKLTRNKSKRYLKLQSKLAYIQHRQAEIRKLQHTCLANHMLTLGDRFFVEKMNWPGLAHRAKETSISEKTGRYKRKKRFGKSLANKAPAMFISILKRKCETLGLPGVVEVDTFRLKASQYNHLSDTYEKKSLSERWNYMPISDGSDSSKTKRIQRDLYSAFLLQHTIPQPCSFDKEALREDYPNFVTMHDAEIHRLEYLPKTITSMGVRRSHS

SEQ ID NO: 1946 - protein, 529 aa, unidentified
  REGION 1..529: note = Category: MG81 effectors
  REGION 1..529: note = Description: MG81-224 effector
  source 1..529: note = uncultivated organism sequence
MANNNNNNNNNTDTCVLTLPLRVEKWQEDCLLKRFEAARRIYNSLLNFELKKLRQLERTVEYRQIQSVISSAYRSNTKDSPECKDAFKRREKLISANGISENGFKSDVKFFYKHFDGLIGSNVAVHCIAVQLWAAFDKYLSGSGKEIHFKRLGDISSLKGYSVKGKSGGCEIIFRGQYVEWTRKKKKLLLPLKIDPDNEYEREMLSRRVKYVRIIKKPGKNRLRWYAQLTLEGKPALKYSAGTGKPIHSVGKGNVGIDIGPQTVAYASDKEVALLELADRVTNIEHQKKKLQRKLDRSRRATNPDNYKPDGTIKRGVKLTRNKSKRYLKLQSKLAYIQHRQAEIRKLQHTCLANHMLTLGDRFFVEKMNWPGLAHRAKETSISEKTGRYKRKKRFGKSLANKAPAMFISILKRKCETLGLPGVVEVDTFRLRASQYNHLSDTYEKKSLSERWNYMPISDGSDSSKTKRIQRDLYSAFLLQHTIPQPCSFDKEALRIDYPNFVIMHDAEIHRLESLPKTITSMGVRRSHS

SEQ ID NO: 1947 - protein, 528 aa, unidentified
  REGION 1..528: note = Category: MG81 effectors
  REGION 1..528: note = Description: MG81-225 effector
  source 1..528: note = uncultivated organism sequence
MILLANNNNNTDTCVLTLPLRVEKWQEDCLLKRFEAARRIYNSLLNFELKKLRQLERTVEYRQVQSVISNAYRSNTKDSPECKAALKRREKLIDENGLTKNGFKNDVKFFYKHFDGLIGSSVAVHCIAVQLWAAFNKYLCGNGKEIHFKRLGDISSLKGYSVKGKSGGCEIIFRGQYVEWTRKKKKLLLPLKIDPDNEYEREMLSRRVKYVRIIKKPGKNRLRWYAQLTLEGKPALKYSAETGKPIHSVGKGDVGIDIGPQTVAYASDKEVALLELADRVTNIEHQKKKLQRKLDRSRRATNPDNYKPDGTIKRGVKLTRNKSKRYLKLQSKLAYIQHRQAEIRKLQHTCLANHMLTLGDRFFVEKMNWPGLAHRAKETSISEKTGRYKRKKRFGKSLANKAPAMFISILKQKCETLGLPGVVEVDTFRLKASQYNHLSDTCEKKSLSERWNYMPISDGSDSSKTKRIQRDLYSAFLLQHTIPQSCSFDKEALRIDYPNFVTMHDAEIHRLESLPKTITSMGVRRSHS

SEQ ID NO: 1948 - protein, 528 aa, unidentified
  REGION 1..528: note = Category: MG81 effectors
  REGION 1..528: note = Description: MG81-226 effector
  source 1..528: note = uncultivated organism sequence
MILLANNNNNTDTCVLTLPLRVEKWQEDCLLKRFEAARRIYNSLLNFELKKLRQLERTVEYRQIQSVISSAYRSNTKDSPECKAALKRREKLIDENGLTKNGFKNDVKFFYKHFDGLIGSNVAVHCIAVQLWAAFDKYLRGSGKEIHFKRLGDISSLKGYSVKGKSGGREIIFRGQYIEWTRKKKKLLLPLKIDPDNEYEREMLSRRVKYVRIIKKPGKNRLRWYAQLTLEGKPALKYSAGTGKPIHSVGKGNVGIDIGPQTVAYASDKEVALLELADRVTNIEHQKKKLQRKLDRSRRATNPDNYKPDGTIKRGVKLTRNKSKRYLKLQSKLAYIQHRQAEIRKLQHTCLANHMLTLGDRFFVEKMNWPGLAHRAKETSISEKTGRYKRKKRFGKSLANKAPAMFISILKRKCETLGLPGVVEVDTYSLKASQYNHLSDTYEKKSLSERWNYMPISDGSDSSKTKRIQRDLYSAFLLQHTIPQPCSFDKEALRIDYPNFVTMHDAEIHRLESLPKTVTSMGVRRSHS

SEQ ID NO: 1949 - protein, 530 aa, unidentified
  REGION 1..530: note = Category: MG81 effectors
  REGION 1..530: note = Description: MG81-227 effector
  source 1..530: note = uncultivated organism sequence
MILLANNNNNNNTDTCVLTLPLRVEKWQEDCLLKRFEAARRIYNSLLNFELKKLRQLERTVEYRQIQSVISSAYRSNTKDSPECKDAFKRREKLISANGISKNGFKSDVKFFYKHFDGLIGSSVAVHCIAVQLWAAFDKYLSGSGKEIHFKRLGDISSLKGYSVKGKSGGCEIIFRGQYVEWTRKKKKLLLPLKIDPDNEYEREMLSRRVKYVRIIKKPGKNRLRWYAQLTLEGKPALKYSAETGKPIHSVGKGNVGIDIGPQTVAYASDKEVALLELADRVTNIEHQKKKLQRKLDRSRRATNPDNYKPDGTIKRGVKLTRNKSKRYLKLQSKLAYIQHRQAEIRKLQHTCLANHMLTLGDRFFVEKMNWPGLAHRAKETSISEKTGRYKRKKRFGKSLANKAPAMFISILKRKCETLGLPGVVEVDTYNLKASQYNHLSDTCEKKSLSERWNYMPISDGSDSSKTKRIQRDLYSAFLLQHTIPQPCSFDKEALRIDYPNFVIMHDAEIHRLESLPKTITSMGVRRSHS

SEQ ID NO: 1950 - protein, 529 aa, unidentified
  REGION 1..529: note = Category: MG81 effectors
  REGION 1..529: note = Description: MG81-228 effector
  source 1..529: note = uncultivated organism sequence
MILLANNNNNNTDTCVLTLPLRVEKWQEDCLLKRFEAARRIYNSLLNFELKKLRQLERTVEYRQIQSVISSAYRSNTKDSLECKDAFKRRKKLTDANGISENGFKSDVKFFYKHFDGLIGSNVAVHCIAVQLWAAFDKYLSGSGKEIHFKRLGDISSLKGYSVKGKSGGCEIIFRGQYVEWTRKKKKLLLPLKIDPDNEYEREMLSKRVKYVRIIKKPGKNRLRWYAQLTLEGKPALKYSAETGKPIHSVGKGNVGIDIGPQTVAYASDKEVALLELADRVTNIEHQKKKLQRKLDRSRRATNPDNYKPDGTIKRGVKLTRNKSKRYLKLQSKLAYIQHRQAEIRKLQHTCLANHMLTLGDRFFVEKMNWPGLAHRAKETSISEKTGRYKRKKRFGKSLANKAPAMFISILKRKCETLGLPGVVEVDTYSLKASQYNHLSDTYEKKSLSERWNYMPISDGSDSSKTKRIQRDLYSAFLLQHTIPQPCSFDKEALRIDYPNFVTMHDAEIHRLESLPKTITSMGVRRSHS

SEQ ID NO: 1951 - protein, 529 aa, unidentified
  REGION 1..529: note = Category: MG81 effectors
  REGION 1..529: note = Description: MG81-229 effector
  source 1..529: note = uncultivated organism sequence
MILLAKNNNNNTDTCVLTLPLRVEKWQEDCLLKRFEAARRIYNSLLNFELKKLRQLERTVEYRQIQSVISSAYRSNTKDSPECKDAFKRREKLISANGISEYGFKSDVKFFYKHFDGLIGSSVAVHCIAVQLWAAFDKYLSGSGKEIHFKRLGDISSLKGYSVKGKSGGREIIFRGQYIEWTRKKKKLLLPLKIDPDNEYEREMLSRRVKYVRIIKKPGKNRLRWYAQLTLEGKPALKYSAGTGKPIHSVGNGDVGIDIGPQTVAYASDKEVALLELADRVTNIEHQKKKLQRKLDRSRRATNPDNYKPDGTIKRGVKLTHNKSKRYLKLQSKLAYIQHRQAEIRKLQHTCLANHMLTLGDRFFVEKMNWPGLAHRAKETSISEKTGRYKRKKRFGKSLANKAPAMFISILKRKCETLGLPGVVEVDTYSLKASQYNHLSDTYEKKSLSERWNYMPISDGSDSSKTKRIQRDLYSAFLLQHTIPQPCSFDKEALRIDYPNFVTMHDAEIHRLGSLPKTITSMGVRRSHS

SEQ ID NO: 1952 - protein, 511 aa, unidentified
  REGION 1..511: note = Category: MG81 effectors
  REGION 1..511: note = Description: MG81-230 effector
  source 1..511: note = uncultivated organism sequence
MAKCSTDTCCLTLPLRLEKWQEDRLAKRFEIARQIYNTMVRAELKKLRAMEQSEPYKANQEKIQALDWKTQTDKQALKALYKERDKLLRDGGFSEYGFKSDIKNYYKHFNNNIGSNVAFHGIAPQVWAAFEKMLFKKEGKKVHFKKKGDIHSLRGYSAAGKSGGVEIIFRETYIEWKGLKLPLKLPPDNIYETQMLSYRVKYVRLLRKPGKRKDRWYAQLSLEGKPVIKYNPKTGEVRHPIGKGAVGLDIGPQTLAYSAATGADLVELANQVQNVEQEKRRLQRKLDRSRRATNPGNYADDGTIRRGIALTHNKSKRYLRTQQELKYLQHQQAEIRKRQHTELANHLLSLGDCFYVEKMVWTSLTHRAKETEISEKTGKIKRKKRFGKSVANKAPATLIGILQRKSAALGIPGVIEVPTSVKASQYNHQSGTYTPKPLSQRWNNMPDGERIQRDLYSAFLLQHYDPQTNTFDANSLHQDYPQFVQYHHDAVLRLYAMPKTPSSMGIKRSLR

SEQ ID NO: 1953 - protein, 511 aa, unidentified
  REGION 1..511: note = Category: MG81 effectors
  REGION 1..511: note = Description: MG81-231 effector
  source 1..511: note = uncultivated organism sequence
MAKCSTDTCCLTLPLRLEKWQEDRLAKRFEIARQIYNTMVRAELKKLRAMEQSEPYKANQEKIQALDWKTQADKQTLKALYKERDKLLRDGGFSEYGFKSDIKNYYKHFNNNIGSSVAVHGIAPQVWAAFEKMLFKKEGKKVHFKKKGDIRSLRGYSATGKSGGVEIIFRETYIEWKGLKLPLKLSPDNIYETQMLSYRVKYVRLLRKPGKRKDRWYAQLSLEGKPVIKYNPKTGEVRHPIGKGAVGLDIGPQTLAYSAATGADLVELANQVQNVEQEKRRLQRKLDRSRRATNPGNYADDGTIRRGIALTHNKSKRYLRTQQELKYLQHQQAEIRKRQHTELANHLLSLGDCFYVEKMVWTSLTHRAKETEISEKTGKIKRKKRFGKSVANKAPATLIGILQRKSAALGIPGVIEVPTSVKASQYNHQSGTYTPKPLSQRWNNMPDGERIQRDLYSAFLLQHYDPQTNTFDANSLHQDYPQFVQYHHDAVLRLYAMPKTPSSMGIKRSLR

SEQ ID NO: 1954 - protein, 511 aa, unidentified
  REGION 1..511: note = Category: MG81 effectors
  REGION 1..511: note = Description: MG81-232 effector
  source 1..511: note = uncultivated organism sequence
MAQRHSTPTCCLTLPLQLEKWQEDRLIKRFEIAGKIYNALLNAELKKLHRLEQLPEYKEIQSQLKAYYQNNLPKTAAFKELNNRRSKLLSEHGFSEYAFKGDMKKFYKHFSSNIGSSVATHCIASQVWSAFEKRLFGGGKFVHFKKSGDIRSLKGFSSSRKSGGVEIMFRGDHIEWKGLLLRLKLDPDNQYESEMLSRRIKYVRIIRKPGKAKWRWYAQLSVEGLPAIKRNDETGEPVHPIGRGAVGIDIGPQTIAYVSQTEVALKELADRVQNIEHEKRLIQRKLDRSRRATNPANYDDNGTIKRGVKLTRNKSKRYLKLQMELSFLQHKQAEIRKQQHINLANHLLSLGDCFYVEDMAWSSLARKAKETAVSEKTGKYKRKKRFGKSIANKAPASLISILDQKCTSLGLLGVIKVPTSVRASQYNHITKSYEKKTLSQRWNIMPDGRRIQRDIYSAFLLQHVTPQRDGFSDEALQQDYENFVSLHDSVIQQLRLMPKTIASMGIRRTYS

SEQ ID NO: 1955 - protein, 528 aa, unidentified
  REGION 1..528: note = Category: MG81 effectors
  REGION 1..528: note = Description: MG81-233 effector
  source 1..528: note = uncultivated organism sequence
MAKNNNNNNNTDTCVLTLPLRVEKWQEDCLLKRFEAARRIYNSLLNFELKKLRQLERTVEYRQIQSVISSAYRSNTKDSPECKAALKRREKLIDENGLTKNGFKNDVKFFYKHFDGLIGSSVAVHCIAVQLWAAFNKYLCGNGKEIHFKRLGDISSLKGYSVKGKSGGCEIIFRGQYVEWTRKKKKLLLPLKIDPDNEYEREMLSRRVKYVRIIKKPGKNRLRWYAQLTLEGKPALKYSAETGKPIHSVGKGDVGIDIGPQTVAYASDKEVALLELADRVTNIEHQKKKLQRKLDRSRRATNPDNYKPDGTIKRGVKLTRNKSKRYLKLQSKLAYIQHRQAEIRKLQHTCLANHMLTLGDRFFVEKMNWPGLAHRAKETSISEKTGRYKRKKRFGKSLANKAPAMFISILKQKCETLGLPGVVEVDTFRLKASQYNHLSDTCEKKSLSERWNYMPISDGSDSSKTKRIQRDLYSAFLLQHTIPQSCSFDKEALRIDYPNFVTMHDAEIHRLESLPKTITSMGVRRSHS

SEQ ID NO: 1956 - protein, 376 aa, unidentified
  REGION 1..376: note = Category: MG81 effectors
  REGION 1..376: note = Description: MG81-234 effector
  source 1..376: note = uncultivated organism sequence
MISALSGTISRHKNKIVKITLKFRLRDKHAAELNRQAHAVNFVWNYCNETQQKAVAYQRRWLSGYDLWKLVAGCAKQGLDLQAHSAMRVCMQYDKSRRQHKKRWLRWRGKKSLGWVPFNTDAVKFRGGAFVFRKTRYETMHLREMKDGIKIGAGSFNQDSRGRRYLNCPVDIAEANSAPNARVGIDLGLHSFATTSDGEKIKAPQFYRKNEAFLATAQRAKKTKRVKAIHAKIANRRKDFLHKESAKLTKQYGLIVVGDVSPSKLAKTLMAKSVLDAGWADFKNTLRYKSIRNGGSTIEVSEAYSSQVCSACGSLPASRPKGIANLGIREWTCDCCGTVHDRDCNAAKNILRSGLATLVEGARQNGSSHDERKQMN

SEQ ID NO: 1957 - protein, 509 aa, unidentified
  REGION 1..509: note = Category: MG81 effectors
  REGION 1..509: note = Description: MG81-235 effector
  source 1..509: note = uncultivated organism sequence
MPYSDVLKVVALSDKIRKAGNELVGLMRKNYNQLMRTKRYRKLLFLYGNTKDKDKRKTYAKQLNEMQKAYNITWEYCRTSMIPIGKKYGVDAVFALTKAEDIWRGIEKCLYGNGNAVHFSRYGELPCIRAKQINRGIPISVTDNKLHFKLGRMVFGIQINDRFQHDEVDAVLSYLAESEILDDRAVNTLIKDGCCIDTYRPCYATLVPRMIRGKYRVYLHLTIEGKAKPKYDKHGSPRHKLGKGMIGADIGTQTVAYTSDTEVGLKNLSERGNSIQTSERKERLLHRAMDRSRRATNPQNYNDDGTVKKGRKTWIYSNHYKKLKEKYSELCRINAINRQLAINEDANHLRSLGDVFITEPKNAGKLMRRAKETTVNSKGKFNRKKRFGRSIKNRCPSGFQTAVEQKFKVSGGIYIEVSNDYRASQYDHTIDDYIKKKLSDRMYKLQDGTEVQRDWYSSFLLYCYDYRTKDINKNKCISEFDKCYNKEKALIEWIKVNEIKVLNSGIKIA

SEQ ID NO: 1958 - protein, 527 aa, unidentified
  REGION 1..527: note = Category: MG81 effectors
  REGION 1..527: note = Description: MG81-236 effector
  source 1..527: note = uncultivated organism sequence
MAKKNNNNNTDTCVLTLPLRVEKWQEDCLLKRFEAARRIYNSLLNFELKKLRQLERTVEYRQIQSVISSAYRSNTKDSPECKAALKRREKLIDENGLTKNGFKNDVKFFCKHFDGLIGSSVAVHCIAVQLWAAFNKYLCGNGKEIHFKRLGDISSLKGYSVKGKSGGCEIIFRGQYVEWTRKKKKLLLPLKIDPDNEYEREMLSRRVKYVRIIKKPGKNRLRWYAQLTLEGKPALKYSAETGKPIHSVGKGDVGIDIGPQTVAYASDKEVALLELADRVTNIEHQKKKLQRKLDRSRRATNPDNYKPDGTIKRGVKLTRNKSKRYLKLQSKLAYIQHRQAEIRKLQHTCLANHMLTLGDRFFVEKMNWPGLAHRAKETSISEKTGRYKRKKRFGKSLANKAPAMFISILKQKCETLGLPGVVEVDTFRLKASQYNHLSDTCEKKSLSERWNYMPISDGSDSSKTKRIQRDLYSAFLLQHTIPQSCSFDKEALRIDYPNFVTMHDAEIHRLESLPKTITSMGVRRSHS

SEQ ID NO: 1959 - protein, 511 aa, unidentified
  REGION 1..511: note = Category: MG81 effectors
  REGION 1..511: note = Description: MG81-237 effector
  source 1..511: note = uncultivated organism sequence
MAQRHSTPTCCLTLPLQLEKWQEDRLIKRFEIAGKIYNALLNAELKKLHRLEQLPEYKEIQSQLKAYYQNNLPKTAAFKELNNRRSKLLSEHGFSEYAFKGDIKKFYKHFSSNIGSSVATHCIASQVWSAFEKRLFGGGKFVHFKKSGDIRSLKGFSSSRKSGGVEIMFRGDHIEWKGLLLRLKLDPDNQYESEMLSRRIKYVRIIRKPGKAKWRWYAQLSVEGLPAIKRNDETGEPVHPIGRGAVGIDIGPQTIAYVSQTEVALKELADRVQNIEHEKRLIQRKLDRSRRATNPANYADNGTIKRGVKLTRNKSKRYLKLQMELSFLQHKQAEIRKQQHINLANHLLSLGDCFYVEDMAWSSLARKAKETAVSEKTGKYKRKKRFGKSIANKAPASLISILDQKCTSLGLLGVIKVPTSVRASQYNHITKSYEKKTLSQRWNIMPDGRRIQRDIYSAFLLQHVTPQRDGFSDEALQQDYENFVSLHDSVIQQLRLMPKTIASMGIRRTYS

SEQ ID NO: 1960 - protein, 511 aa, unidentified
  REGION 1..511: note = Category: MG81 effectors
  REGION 1..511: note = Description: MG81-238 effector
  source 1..511: note = uncultivated organism sequence
MGKSKTETCCLTLPLKLEKWQEDRLAKRFEIARQIYNTLVHAELKKLNQIERSSEYQTIQDQITNLDRNDPERIKELPSLYKKRTKLLRDAGFTEYGFKSDVKYYYKYFHKNIGSSVAVHGIAPQVWAAFEKKLFKKQGKIVHYKRKGTLRSVKGGSATGKSGGTEIIFRGTYIQWKDLNLPLKRSPDNAYESEMLGYRVKYVRILRKPGKSKNRWYAQLVLEGKPVIKRNPMTGAALHPVGHGAVGLDIGPQTLAYSAADGVGLLELADQVQNIERQKALLQRKLDRSRRASNPDNYNEDGTIKRGVKLTRNQSKRYCKTQRDLAYLQHCQAETRKRQHIALANHLLTLGDRFYVEQMSWVALARRSKKTEVSEKTGKIKRKKRFGKSIANKAPAMLIEILRQKCISLGLPGVVDVPTSIKASQYNHQSKDYIKKNLSERWNDMPDGEKIQRDLYSAFLLQHCTPELNAFDQESLQQDYPRFVQYHHQVMQQLSEMPKTPSSMGIRRRTS

SEQ ID NO: 1961 - protein, 534 aa, unidentified
  REGION 1..534: note = Category: MG81 effectors
  REGION 1..534: note = Description: MG81-239 effector
  source 1..534: note = uncultivated organism sequence
MGWKSTGRGGTRVKRSSTDTCCLTLPLKLEKWQSDRLEKRFEIGRQIYNTIVHAELKKLRKLEKTQQYQEIEQKLENAKQEETKELWKKKRQLLDQNGLSENHFKADMKYYYPHFKDNIASSVAVHGIASQAWTAFEKVLLSKDGKMVHFKKKGELSSLRGYSQAGKSGGIEIIFRGSYVEWKGLKLPLQLSPNNEYETEMLSKRVKYIRILRKDGKTKTHWYAQLALEGKPAVKRDSISGAPKHPIGHGVVGIDIGTRTLAYSTDSEVNLLELADRVQNIEQEKRRLQRKMDRSRRAMNPGNYKPDGSIKQGVKLKWNNSKRYKRIQHQYAMIQHHQADIRKQQHNELANYLLTLGDCFFVENMSYCDLAHRANKTEISEKTGRYKRKKRFGKSIANKAPAMLITMLKQKCQSRGLEGVKEVDTHVCASQYNHQTDTCIKKALENRWNIMPDGERIQRDLYSAFLLQHCKQGLPEYNRKELKKEFGEELYRVFDREALQRDYPQFVAYHHMTIQRLSELPHTIPSMGIRRIIS

SEQ ID NO: 1962 - protein, 511 aa, unidentified
  REGION 1..511: note = Category: MG81 effectors
  REGION 1..511: note = Description: MG81-240 effector
  source 1..511: note = uncultivated organism sequence
MKKSNTDTCCLTLPLKLEKWQEDRLAKRFEIARQIYNTMVHAELKKLRNIENSQPYRQIQKQIEALNWKNQNDKARLKSLYNDRNKLLNTIGFSEYGFKADIKYYYKHFNDNIGSSVAVHGIAPQVWAAFEKMLFYKEGKKVHYKKKDDIHSLHGYSVTGKSGGVEIIFRKTYIEWKGLKLPLKRSPDNAYETEMLGRRVKYVRLLRKPGKRKDCWYAQLSLEGKPAIKRDPESGERRHSIGRGAVGLDIGPQTLAYSACGAADLVELADQVQNIEQMKRRLQRKLDRSRRATNPDNYADNGTIRRGVKLTHNKSNRYRRTQRELRYLQHCQAEIRKRQHIELANHLLALGDCFYVEDMAWPSLTHRAKETAISEKTGRIKRKKRFGKSVANKAPATLIGILEQKCNSLGLRGVIKVPTSLRASQYNHQSGEYTSKPLSQRWNNMPDGERIQRDLYSAFLLQHYDPKAGNFDSALLQQDYPQFVQYHHRAIQRLSTVPKTLSSMGIQRSLR

SEQ ID NO: 1963 - protein, 511 aa, unidentified
  REGION 1..511: note = Category: MG81 effectors
  REGION 1..511: note = Description: MG81-241 effector
  source 1..511: note = uncultivated organism sequence
MGKSSTDTCCLTLPLKLEKWQEDRLAKRFEIARQIYNTMVRAELKKLDRVKQLPEYRKNQKEIQALDWKNSADKQRLKELYGNQRKILQKQGFTEYGFKADSKDYYKHFIENIGSSVATHGIAPQVWNAFDKMLFQKDGKVVHFKRYGDVHSLKGGSVAHKSGGAEIMFRKTYIEWKGLKLPLKLSPNNAYEAEMLSYRVKYVRILRTRGKTKDRWYAQLSLEGKPAVKYDSNTGKPVHPVGRGAVGLDIGPQTLAYAGANEANLVELADQVQNIEQEKRRLQRKLDRSRRATNPDNYNENGTIRRGVKLTHNKSKRYCKLQKELSWIQHCQAETRKRQHIALANHLLSLGDCFYVEPMAWPSLTHRAKKTEVSEETGRIKRKKRFGKSVANKAPASLIGILKLKCISLGLTGVVEVPMLLRASQYNHQSKDYAKKSLSQRWNDMPDGNRIQRDLYSAFLLQHYDSRSESFDQETLERDYPQFVRLHNQTIQRLSALPKTPSSMGIRRSVS

SEQ ID NO: 1964 - protein, 530 aa, unidentified
  REGION 1..530: note = Category: MG81 effectors
  REGION 1..530: note = Description: MG81-242 effector
  source 1..530: note = uncultivated organism sequence
MILLAKNNNNNNTDTCVLTLPLRVEKWQEDCLLKRFEAARRIYNSLLNFELKKLRQLERTVEYRQIQSVISSAYRSNTKDSPECKDAFKRREKLISANGISENGFKSDVKFFYKHFDGLIGSNVAVHCIAVQLWAAFDKYLSGSGKEIHFKRLGDISSLKGYSVKGKSGGCEIIFRGQYVEWTRKKKKLLLPLKIDPDNEYEREMLSRRVKYVRIIKKPGKNRLRWYAQLTLEGKPALKYSAETGKPIHSVGKGNVGIDIGPQTVAYASDKEVALLELADRVTNIEHQKKKLQRKLDRSRRATNPDNYKPDGTIKCGVKLTRNKSKRYLKLQSKLAYIQHRQAEIRKLQHTCLANHMLTLGDRFFVEKMNWPGLAHRAKETSISEKTGRYKRKKRFGKSLANKAPAMFISILKRKCETLGLPGVVEVDTYSLKASQYNHLSDTYEKKSLSERWNYMPISDGSDSSKTKRIQRDLYSAFLLQHTIPHPCSFDKKALRIDYPNFVTMHDAEIHRLESLPKTITSMGVRRSHS

SEQ ID NO: 1965 - protein, 554 aa, unidentified
  REGION 1..554: note = Category: MG81 effectors
  REGION 1..554: note = Description: MG81-243 effector
  source 1..554: note = uncultivated organism sequence
MDNEEKKEDGATCCLTLPLKLEKWQSDHLEKRFEIARQLYNTLVHAELKRIHRIERMPEYREIERLIEATTDKKEKWALKNQKKQFLRKNGINRNTFTTDMKRLYKHFNDNIGSNVAQHGIVSQVLTAFEKVYIENQSGEVHFKKPGDLRSVQGYSQKKSGGVEIMFREGKIIWTQQENDDRKKSPKYQQRKKRQNYKGVKGIAREFPVVFSKNNPYEAEMLTKHVKFVRILRKDGKTKPHWYAQLVLEGRPVTKYDPISGAPKHPVGHGVVGIDIGTRTLAYSNDKEVNLLELADRVQNIEQEKRRLQRKMDRSRRAMNPENYNSDGTFKRGVKLTRNKSKRYRRIQHQLAMIQHHQADIRKQQHNELANYLLTLGDCFFVENMSYCDLVHRANKTEISEKTGRYKRKKRFGKSIANKAPAMLITMLKQKCQSRGLKGVKEVDTHVRASQYNHQTDTCIEKALENRWNVMPDGERIQRDLYSAFLLQHCKQGLPEYNRKELKKEFGEELYRVFDREALQRDYPQFVAYHHMTIQRLSELPHTIPSMGIRRIIS

SEQ ID NO: 1966 - protein, 522 aa, unidentified
  REGION 1..522: note = Category: MG81 effectors
  REGION 1..522: note = Description: MG81-244 effector
  source 1..522: note = uncultivated organism sequence
MKRSSTDTCCLTLPLKLEKWQSDRLEKRFEIGRQIYNTIVHAELKKLRKLERTQQYQEIEQKLENAKQEETKELWKKKRQLLDQNGLSENHFKADMKYYYPHFKDNIASSVAVHGIASQAWTAFEKVLLSKDGKMVHFKKKGELSSLRGYSQAGKSGGIEIIFRGSYVEWKGLKLPLQLSPNNEYETEMLSKRVKYVRILRKDGKTKTHWYAQLALEGKPAVKRDSISGAPKHPVGHGVVGIDIGTRTLAYSADSKVDLIELADRVQNIEQEKMLLQRKLDRSRRATNPENYKPDGSIKQGVKLTWNNSKRYKRIQHQYAMIQHHQADIRKQQHNELANYLLTLGDCFFVEDMDYRALTRKAKKTEISEKTGRYKRKKRFGKSIANKAPSMLIALLDQKCKSLNLEGVKKVDTAVKASQYNHQTDECKAKELKERWNIMPDGERIQRDLYSAFLLQHCRRDLPEYNRKKLQEAFGNELYRVFDREALQRDYPKFVEYHRKTIQRLSALPKTIASMGIRRIIS

SEQ ID NO: 1967 - protein, 495 aa, unidentified
  REGION 1..495: note = Category: MG81 effectors
  REGION 1..495: note = Description: MG81-245 effector
  source 1..495: note = uncultivated organism sequence
MSKTDGDRCILTLPLHTEPWQEQIIETRFGIMEHLKNSLIAMEMRKLKNLRRTKTFRDIEKRITETPKEERKALNMQRTAMLRDAGFSEFDFINDITPMQKHFADHIAAQIAHRSASDIWRAFESYLYSSGRDVHFQKRGTLDSVACKKIGNGMNYRNDTFEWSGGRTPNARKLYIPVEKPNTEYEKQMLRKEIKNLRIVRKWMKTRFKYYLQLTLVGQPYQKERRIGNGRVGIDIGTRTIAIASDAAVRLLELADQVDGNHAKKCEIQRRMDASKRATNPENYNADGTIRRPVRGRKMTWHFSNNYMKMQSRVRELERKNADIRKYQHNCLANETLALGTDIFVEPMAYKGLQRRAKETKTDENGRYLKKKRFGKSLANKAPSMFLTILDNKLKCHGKQLLKVDIAQFRASQFDHTNGTYRKKLLSERFAELSNGDRIQRDMYSAFLLMNSNDDLTGPDPERCAATYERFKELHEKETVRIRNKQGRRIASFGI

SEQ ID NO: 1968 - protein, 536 aa, unidentified
  REGION 1..536: note = Category: MG81 effectors
  REGION 1..536: note = Description: MG81-246 effector
  source 1..536: note = uncultivated organism sequence
MNNEEKEKDGATCCLTLPLKLEKWQSDHLEKRFEIARQLYNTLVHAELKRIHRIERMPEYREIERLIEATTDKKEKWALKNQKKQFLRKNGINRNTFTMDMKRLYKHFNDNIGSNVAQHGIVSQVLTAFEKVYIENQSGEVHFKKPGDLRSVQGYSQKKSGGVEIMFREGKIIWNQQGNNDRKGVAREFPLKLSPDNSYEAEMLKKHVKFVRILRKEGKTKPHWYAQLVLEGKPAIKRDPASGAPKHPVGHGVVGIDIGTRTLAYSADSKVDLIELADRVQNIEQEKLLLQRKLDRSRRATNPENYKPDGTIKKGVKLTWNNSKRYKRIQHQYAMIQHHQADIRKQQHNELANYLLTLGDCFFVEDMDYRALTRKAKKTEISEKTGRYKRKKRFGKSIANKAPSMLIALLDQKCKSLNLEGVKKVDTAVKASQYNHQTDECKAKELKERWNIMPDGERIQRDLYSAFLLQHCRRDLPEYNRKKLQETFGNELYRIFDREALQRDYPKFVEYHRETIQRLSALPKTIASMGIRRSIS

SEQ ID NO: 1969 - protein, 512 aa, unidentified
  REGION 1..512: note = Category: MG81 effectors
  REGION 1..512: note = Description: MG81-247 effector
  source 1..512: note = uncultivated organism sequence
MPTKQKEGGNRCVLTLPLLTEPWQEHIIEKRFKIIEHLKNQLISIELRKLKNLQRTKAYKNLIKQIESVPKSERTALYKERNKMLKDAGFSQYTFMDDMAGKKSLMQKHFESHINVQIAHKAAIDVWSSFEKFLFGSGQMIHYQKRGTLSSVASKSPKTGMFYYSDENIFKWSGGGTKPKGGIILCLRVASVKTNYEKEMVANNEIKYYRVVRKWMKTKYKYYLQITFAGKPADKHREISTGRVGIDIGTQTIAIASDKSVKLLELADKVNKNHIKKCELQRKLDRSRRYTNPDNFNPDGTVKRGTKGHKLKWNKSKHYLEIAGKIRELERKNADIRKYQHTCLANDILAMGNQIYIEPMNYKGLQKRAKETQVDEKGRYKKKKRFGKSLANKAPAMFVRILKTKAEQHGGEVYEVDIMSYRASQCDHTTGEYTKHGLNDRWRILGNGDKVQRDLYSAFLIKNSNKTHDEIDLDKCSKTYDNFKKLHDKEIENIRNEVKLRERKNISSYGIA

SEQ ID NO: 1970 - protein, 512 aa, unidentified
  REGION 1..512: note = Category: MG81 effectors
  REGION 1..512: note = Description: MG81-248 effector
  source 1..512: note = uncultivated organism sequence
MPAKQKEGGNRCVLTLPLLTEPWQEHIIEKRFKIIEHLKNQLISIELRKLKNLQRTKAYKNLIKQIESVPKSERTALYKERNKMLKDAGFSQYTFMDDMAGKKSLMQKHFESHINVQIAHKAAIDVWSSFEKFLFGTGQIVHYQKRGTLSSVASKSPKTGMFYYSDENIFKWSGGGTKPKGGIILCLRVASVKTNYEKEMVANNEIKYYRVVRKWMKTKYKYYLQITFAGKPADKHREISTGRVGIDIGTQTIAIASDKSVKLLELADKVNKNHIKKCELQRKLDRSRRYTNPDNFNPDGTVKRGTKGHKLKWNKSKHYIEIAGKIRELERKNADIRKYQHTCLANDILAMGNQIYIEPMNYKGLQKRAKETQVDEKGRYKKKKRFGKSLANKAPSMFVTILKTKAEQHGGEVYEVDIMSYRASQCDHTTGEYTKHGLNDRWRILGNGDKVQRDLYSAFLIKNSNKTHDEIDLDKCSKTYDNFKKLHDKEIENIRNEVILRKRRNISSYGIA

SEQ ID NO: 1971 - protein, 501 aa, unidentified
  REGION 1..501: note = Category: MG81 effectors
  REGION 1..501: note = Description: MG81-249 effector
  source 1..501: note = uncultivated organism sequence
MNEGDGMPKEDKESCCVLQLRLYPEPWQVQIIETRFKVLEHLKNSLIALELRKLRNLERTRAYREIQEQIKLADDKSKIKLYAKRRKLLKDAGFSEFVFKDDITPMQKHFAAHIATHVAHRAASEVWRAFDKFLFGNGKMVHYVRRGTLRSASNQKAGTTMTLENGYFKWNGGRDQNSIAINIRVAKPTTYYEKEMLQKKAKYFRIVRKWGKIGYKYYLQITLAGLPAVKPRLIANEKNVGIDIGPSSIAIVSDKKVELRALADKVQNNHIEKCSLQRSMDRSRRNLNPQNYNEDGTIRRGIRLNWTFSKHYIEMRGKVRMLERKNVDIRKYQHTCLANEVISLGTDVYIEQMSFKGLQRRAKETTYREDGRPKRKKRFGKSIANRAPAMFVEILGRKLTTIVGTELNKVDTFKFRASQYDHTNGSYKKKLLKERWAQLSNGDRIQRDLYSAFLLKNSNADLNSTNVEQCNATYDVFKIMHDDCITKLKSEKKSCLPSFGV

SEQ ID NO: 1972 - protein, 511 aa, unidentified
  REGION 1..511: note = Category: MG81 effectors
  REGION 1..511: note = Description: MG81-250 effector
  source 1..511: note = uncultivated organism sequence
MAKCSTDTCCLTLPLRLEKWQEDRLAKRFEIARQIYNTMVRAELKKLRAIEQSEPYKANQEKIQALDWKTQADKQALKALYKERDKLLRNGGFSEYGFKSDIKNYYKHFNNNIGSSVAVHGVAPQVWTAFEKMLFKKEGKKVHFKKKGDIRSLRGYSVTGKSGGVEIIFRETYIEWKGLKLPLKLSPDNIYETQMLSYRVKYVRLLRKPGKRKDRWYAQLSLEGKPVIKYNPKTGEVRHPIGKGAVGLDIGPQTLAYSAATGADLVELANQVQNVEQEKRRLQRKLDRSRRATNPGNYADDGTIRRGIALTHNKSKRYLRTQQELKYLQHQQAEIRKRQHTELANHLLSLGDCFYVEKMVWTSLTHRAKETEISEKTGKIKRKKRFGKSVANKAPATLIGILQRKSAALGIPGVIEVPTSVKASQYNHQSGTYTPKPLSQRWNNMPDGERIQRDLYSAFLLQHYDPQTNTFDANSLHQDYPQFVQYHHDAVLRLYAMPKTPSSMGIKRSLR

SEQ ID NO: 1973 - protein, 423 aa, unidentified
  REGION 1..423: note = Category: MG81 effectors
  REGION 1..423: note = Description: MG81-251 effector
  source 1..423: note = uncultivated organism sequence
MKYYYPHFKDNIASSVAVHGIASQAWTAFEKVLLSKDGKMVHFKKKGELSSLRGYSQAGKSGGIEIIFRGSYVEWKGLKLSSNNDYETEMLSRRVKYVRILRQDGKTKPHWYAQLVLEGKPAVKRDPISGAPKHPIGHGAVGIDIGTRTLAYSADSKVDLIELADRVQNIEQEKLLLQRKLDRSRRATNPENYKPDGTIKKGVKLTRNKSKRYRKIQHQLAMLQHRQANIRKRQHNELANYLLTLGDCFFVEDMDYRALTRKAKKTEISEKTGRYKRKKRFGKSIANKAPSMLIALLDQKCKSLNLEGVKKVDTAVKASQYNHQTDECKAKELKERWNIMPDGERIQRDLYSAFLLQHCRRDLPEYNRKKLQEAFGNELYRVFDREALQRDYPKFVEYHRKTIQRLSALPKTIASMGIRRSIS

SEQ ID NO: 1974 - protein, 522 aa, unidentified
  REGION 1..522: note = Category: MG81 effectors
  REGION 1..522: note = Description: MG81-252 effector
  source 1..522: note = uncultivated organism sequence
MKKSSTDTCCLTLPLKLEKWQSDRLEKRFEIGRQIYNTIVHAELKKLRKLERTQQYQEIEQKLENAKQEETKELWKKKRQLLDQNGLSENHFKADMKYYYPHFKDNIASSVAVHGIASQAWTAFEKVLLSKDGKMVHFKKKGELSSLRGYSQAGKSGGIEIIFRGSYVEWKGLKLPLQLSPNNEYETEMLSKRVKYVRILRKDGKTKTHWYAQLVLEGKPAIKRDPASGAPKHPVGHGAVGIDIGTRTLAYSNDKEVNLLELADRVQNIEQEKRRLQRKMDRSRRAMNPENYNSDGTFKRGVKLTRNKSKRYRRIQHQLAMIQHHQADIRKQQHNELANYLLTLGDCFFVENMSYCDLVHRANKTEISEKTGRYKRKKRFGKSIANKAPAMLITMLKQKCQSRGLKGVKEVDTHVRASQYNHQTDTCIEKALENRWNVMPDGERIQRDLYSAFLLQHCKQGLPEYNRKELKKEFGEELYRVFDREALQRDYPQFVAYHHMTIQRLSELPHTIPSMGIRRIIS

SEQ ID NO: 1975 - protein, 427 aa, unidentified
  REGION 1..427: note = Category: MG81 effectors
  REGION 1..427: note = Description: MG81-253 effector
  source 1..427: note = uncultivated organism sequence
MKYYYQHFKENIGSSVAVHGIASQAWTAFEKVLFSKDGKMVHFKKKGELSSLRGYSQAGKSGGVEIIFRGSYVEWKGLKLPLKLSPDNDYETEMLSKRVKYVRILRQDGKTKPHWYAQLVLEGKPAIKRDPASGAPKHPVGHGVVGIDIGTRTLAYSADSKVDLIELADRVQNIEQEKLLLQRKLDRSRRATNPENYKPDGTIKTGVKLTRNKSKRYRKIQHQLAMLQHRQADIRKRQHNELANYLLTLGDCFFVEDMDYRALTRKAKKTEISEKTGRYKCKKRFGKSIANKAPSMLIALLDQKCKSLNLEGVKKVDTAVKASQYNHQTDECKAKELKERWNIMPDGERIQRDLYSAFLLQHCRRDLPEYNRKELQKEFGEELYRVFDREALQRDYPQFVAYHHMTIQRLSELPHTIPSMGIRRIIS

SEQ ID NO: 1976 - protein, 534 aa, unidentified
  REGION 1..534: note = Category: MG81 effectors
  REGION 1..534: note = Description: MG81-254 effector
  source 1..534: note = uncultivated organism sequence
MGWKSKGRGGKRVKRSSTDTCCLTLPLKLEKWQSDRLEKRFEIGRQIYNTIVHAELKKLRKLERTQQYQEIEQKLENAKQEETKELWKKKRQLLDQNGLSEDHFKADMKYYYPHFKDNIASNVAVHGIASQAWTAFEKVLFSKDGKMVHFKKKGELSSLRGYSRAGKSGGVEIIFRGSYVEWKGLKLPLKLSPDNDYETEMLSKRVKYVRILRKDGKTKTHWYAQLALEGKPAVKRDSISGAPKHPVGHGVVGIDIGTRTLAYSTDSEVNLLELADRVQNIEQEKRRLQRKMDRSRRAMNPGNYKPDGSIKQGVKLTWNNSKRYKRIQHQYAMIQHHQADIRKQQHNELANYLLTLGDCFFVENMSYCDLAHRANKTEISEKTGRYKRKKRFGKSIANKAPAMLITMLKQKCQSRGLEGVKEVDTHVCASQYNHQTDTCIKKALENRWNVMPDGERIQRDLYSAFLLQHCRRDLPEYNREELQKEFGEELYRVFDREALQRDYPQFVAYHHMTIQRLSELPHTIPSMGIRRIIS

SEQ ID NO: 1977 - protein, 526 aa, unidentified
  REGION 1..526: note = Category: MG81 effectors
  REGION 1..526: note = Description: MG81-255 effector
  source 1..526: note = uncultivated organism sequence
MNNEEKEKDGATCCLTLPLKLEKWQSDRLEKRFEIGRQIYNTIVHAELKKLRKLERTQQYQEIEQKLENAKQEETKELWKKKRQLLDQNGLSENHFKADMKHYYPHFKDNIASSVAVHGIASQAWTAFEKVLLSKDGKMVHFKKKGELSSLRGYSQAGKSGGIEIIFRGSYVEWKGLKLPLKLSPDNDYETEMLSKRVKYVRILRKDGKTKTHWYAQLALEGKPAVKRDSISGAPKHPVGHGVVGIDIGTRTLAYSTDKEVNLLELADRVQNIEQEKRRLQRKMDRSRRAMNPGNYKPDGSIKQGVKLTWNNFKRYKRIQHQYAMIQHHQADIRKQQHNELANYLLTLGDCFFVENMSYCDLAHRANKTEISEKTGRYKRKKRFGKSIANKAPAMLITMLKQKCQSRGLEGVKEVDTHVCASQYNHQTDTCIKKALENRWNIMPDGERIQRDLYSAFLLQHCRRDLPEYNRKELQKEFGEELYRVFDREALQRDYPQFVAYHHMTIQRLSELPHTIPSMGIRRIIS

SEQ ID NO: 1978 - protein, 538 aa, unidentified
  REGION 1..538: note = Category: MG81 effectors
  REGION 1..538: note = Description: MG81-256 effector
  source 1..538: note = uncultivated organism sequence
MDNEEKEKDGATCCLMLPLKLEKWQSDHLEKRFEIARQLYNTLVHAELKKKCQVERMPEYQEIMKMIDAASNQKEKWALEKKRKAFLEENGFSRNAFKADMEKYYKHFNDNIGANVALHGITAQVWIAFDKVFVDNYKQKGKVHFKKPGELCSVQGYSQKKSGGKEIMFREDRIIWNQQGNRDRKKVKREFLLKLSPDNPYEAEMLKRHVKFVRILRKDGKTKPHWYAQLVLEGKPAVKRDPASGAPKHPIGHGVVGIDIGTRTLAYSTDSEVNLLELADRVQNIEQEKRRLQRKMDRSRRAMNPGNYKPDGSIKQGVKLTWNNSKRYKRIQHQYAMIQHHQADIRKQQHNELANYLLTLGDCFFVENMSYCDLAHRANKTEISEKTGRYKRKKRFGKSIANKAPAMLITMLKQKCQSRGLEGVKEVDTHVCASQYNHQTDTCIKKALENRWNIMPDGERIQRDLYSAFLLQHCRRDLPEYNRKELQKEFGEELYRVFDREALQRDYPQFVAYHHMTIQRLSELPHTIPSMGIRRIIS

SEQ ID NO: 1979 - protein, 511 aa, unidentified
  REGION 1..511: note = Category: MG81 effectors
  REGION 1..511: note = Description: MG81-257 effector
  source 1..511: note = uncultivated organism sequence
MGKSSTDTCCLTLPLKLEKWQEDRLAKRFEIARQIYNTMVRAELKRLRQVEQSPQYRSNKKAIQALDWKNTADKPKLKTLYRERDKLLKGGGFTEYGFKSDIKNFYKHFAENIGSSVAVHGIAPQVWAAFERVLFKKEGKKVHFKKTGDIRSLRGYSVTGKSGGVEIIFRGSYIEWKGLNLPLKLSPDNAYETEMLSYRVKYVRILRKPGKTRDRWYAQLSLEGKPAIKRNPASGNPVHPVGQGAVGLDIGPQTLAYAAEKEANLVELADRVQNIEREKHLLQRKMDRSRRAANPDNYAENGTIRRGVKLTHNKSKRYLRLQRELCYLQHCQAETRKRQHTELANHLLSLGSCFYVEDMAWPSLTHRAKKTEISDKTGRIKRKKRFGKSIANKAPAALINILRTKCVSLGIPGVVEVPTSLKASQYNHQSKEYTPKPLSQRWNDMPDGSRIQRDLYSAFLLQHYDPQSGNFDQASLEADYPQFVQLHNQSIQRLLTVPKTPSSMGIRRSVS

SEQ ID NO: 1980 - protein, 538 aa, unidentified
  REGION 1..538: note = Category: MG81 effectors
  REGION 1..538: note = Description: MG81-258 effector
  source 1..538: note = uncultivated organism sequence
MNNEEKEKEGATCCLTLPLKLEKWQSDHLEKRFEIAQQLYNTLVHAELKKKCQVERMPEYQEIMKMIDTASNQKEKWALEKKRKAFLEENGFSRNAFKADMEKYYKHFNDNIGANVALHGITAQVWIAFDKVFVDNYKQKGKVHFKKPGELCSVQGYSQKKSGGKEIMFREDRIIWNQQGNRDRKKVKREFLLKLSPDNPYEAEMLKRHVKFVRILCKDGKTKPHWYAQLVLEGKPAVKRDPISSAPKHPVGHGVVGIDIGTRTLAYSTDKEVNLLELADHVQNIEQEKRRLQRKMDRSRRATNPENYNPDGTFKRGVKLTRNKSKRYRRIQHQLAMIQHHQADIRKQQHNELANYLLTLGDCFFVENMSYCDLVHRANKTEISEKTGRYKRKKRFGKSIANKAPAMLITMLKQKCQSRGLKGVKEVDTHVRASQYNHQTDTCIEKALENRWNVMPDGERIQRDLYSAFLLQHCKQGLPEYNRKELKKEFGEELYRVFDREALQRDYPQFVAYHHMTIQRLSELPHTIPSMGIRRIIS

SEQ ID NO: 1981 - protein, 533 aa, unidentified
  REGION 1..533: note = Category: MG81 effectors
  REGION 1..533: note = Description: MG81-259 effector
  source 1..533: note = uncultivated organism sequence
MILLANNNNNNNNNNTDTCVLTLPLRVEKWQEDCLLKRFEAARRIYNSLLNFELKKLRQLERTVEYRQIQSVISSAYRSNTKDSPECKDAFKRREKLISANGISEYGFKSDVKFFYKHFDGLIGSSVAVHCIAVQLWAAFDKYLRGSGKEIHFKRLGEISSLKGYSVKGKSGGLEIIFRGQYIEWTRKKKKLLLPLKIDPDNEYEREMLSRRVKYVRIIKKPGKNRLRWYAQLTLEGKPALKYSAETGKPIHSVGKGNVGIDIGPQTVAYASDKEVALLELADRVTNIEHQKKKLQRKLDRSRRATNPDNYKPDGTIKRGVKLTRNKSKRYLKLQSKLAYIQHRQAEIRKLQHTCLANHMLTLGDRFFVEKMNWPGLAHRAKETSISEKTGRYKRKKRFGKSLANKAPAMFISILKRKCETLGLPGVVEVDTYNLKASQYNHLSDTYEKKSLSERWNYMPISDGSDSSKTKRIQRDLYSAFLLQHTIPQPCSFDKEALRIDYPNFVTMHDAEIHRLESLPKTVTSMGVRRSHS

SEQ ID NO: 1982 - protein, 414 aa, unidentified
  REGION 1..414: note = Category: MG81 effectors
  REGION 1..414: note = Description: MG81-260 effector
  source 1..414: note = uncultivated organism sequence
MWIAFDKVFVDNYKQKGKVHFKKPGELCSVQGYSQKKSGGKEIMFREDRIIWNQQGNRDRKKVKREFLLKLSPDNPYEAEMLKRHVKFVRILRKDGKTKPHWYAQLVLEGKPAVKRDPASGAPKHPIGHGVVGIDIGTRTLAYSTDKEVNLLELADRVQNIEQEKRRLQRKMDRSRRATNPENYNPDGTFKRGVKLTRNKSKRYKRIQHQYAMIQHHQADIRKQQHNELANYLLTLGDCFFVENMSYCDLVHRANKTEISEKTGRYKRKKRFGKSIANKAPAMLITMLKQKCQSRGLEGVKEVDTHVCASQYNHQTDTCIKKALENRWNIMPDGERIQRDLYSAFLLQHCRRDLPEYNRKELQKEFGEELYRVFDREALQRDYPQFVAYHHMTIQRLSELPHTIPSMGIRRIIS

SEQ ID NO: 1983 - protein, 534 aa, unidentified
  REGION 1..534: note = Category: MG81 effectors
  REGION 1..534: note = Description: MG81-261 effector
  source 1..534: note = uncultivated organism sequence
MGWKSKGRGGTRVKKSSTDTCCLTLPLKLEKWQSDRLEKRFEIGRQIYNTVVRAELKKLHQVERTPQYREIEQKLKGAKQEEAKELWKKRTQLLSKSGFSEYGFKSDMKYYYQHFKENIGSSVAVHGIASQVWTAFEKVLFSKDGKMVHFKKKGELSSLRGYSQAGKSGGIEIIFRGSYVEWKGLKLPLKLSSNNDYETEMLSKRVKYVRILRQEGKTKPHWYAQLVLEGKPAIKRDPASGTPKHPIGHGVVGIDIGTRTLAYSTDKEVNLLELADRVQNIEQEKRRLQRKMDRSRRAMNPENYNSDGTFKRGVKLTRNKSKRYRRIQHQLAMIQHHQADIRKQQHNELANYLLTLGDCFFVENMSYCDLVHRANKTEISEKTGRYKRKKRFGKSIANKAPAMLITMLKQKCQSRGLKGVKEVDTHVRASQYNHQTDTCIEKALENRWNVMLDGERIQRDLYSAFLLQHCKQGLPEYNRKELKKEFGEELYRVFDREALQRDYPQFVAYHHMTIQRLSELPHTIPSMGIRRIIS

SEQ ID NO: 1984 - protein, 538 aa, unidentified
  REGION 1..538: note = Category: MG81 effectors
  REGION 1..538: note = Description: MG81-262 effector
  source 1..538: note = uncultivated organism sequence
MDNEEKEKDGATCCLTLPLKLEKWQSDHLEKRFEIARQLYNTLVHAELKKKCQVERMPEYQEIMKMIDAASNQKEKWALEKKRKAFLEENGFSRNAFKADMEKYYKHFNDNIGANVALHGITAQVWIAFDKVFVDNYKQKGKVHFKKPGELCSVQGYSQKKSGGKEIMFREDRIIWNQQGNRDRKKVKREFLLKLSPDNPYEAEMLKRHVKFVRILRKDGKTKPHWYAQLVLEGKPAVKRDPASGAPKHPIGHGVVGIDIGTRTLAYSTDKEVNLLELADHVQNIEQEKRRLQRKMDRSRRATNPENYNPDGTFKRGVKLTRNKSKRYRRIQHQLAMIQHHQADIRKQQHNELANYLLTLGDCFFVENMSYCDLVHRANKTEISEKTGRYKRKKRFGKSIANKAPTMLITMLKQKCQSRGLEGVKEVDTHVRASQYNHQTDTCIEKALENRWNVMPDGERIQRDLYSAFLLQHCKQGLPEYNRKELKKEFGEELYRVFDREALQRDYPQFVAYHHMTIQRLSELPHTIPSMGIRRIIS

SEQ ID NO: 1985 - protein, 534 aa, unidentified
  REGION 1..534: note = Category: MG81 effectors
  REGION 1..534: note = Description: MG81-263 effector
  source 1..534: note = uncultivated organism sequence
MGWKSTGRGGTRVKRSSTDTCCLTLPLKLEKWQSDRLEKRFEIGRQIYNTIVHAELKKLRKLERTQQYQEIEQKLENAKQEETKELWKKKRQLLDQNGLSENHFKADMKYYYPHFKDNIASSVAVHGIASQAWTAFEKVLLSKDGKMVHFKKKGELSSLRGYSQAGKSGGIEIIFRGSYVEWKGLKLPLKLSPNNEYETEMLSKRVKYVRILRKDGKTKTHWYAQLALEGKPAVKRDSISGAPKHPVGHGVVGIDIGTRTLAYSTDSEVNLLELADRVQNIEQEKRRLQRKMDRSRRAMNPGNYKPDGSIKQGVKLTWNNSKRYKRIQHQYAMIQHHQADIRKQQHNELANYLLTLGDCFFVENMSYCDLAHRANKTEISEKTGRYKRKKRFGKSIANKAPAMLITMLKQKCQSRGLEGVKEVDTHVCASQYNHQTDTCIKKALENRWNVMPDGERIQRDLYSAFLLQHCRRDLPEYNRKELQKEFGEELYRVFDREALQRDYPRFVAYHHMTIQRLSELPHTIPSMGIRRIIS

SEQ ID NO: 1986 - protein, 550 aa, unidentified
  REGION 1..550: note = Category: MG81 effectors
  REGION 1..550: note = Description: MG81-264 effector
  source 1..550: note = uncultivated organism sequence
MGWKSKGRGGTLVDNEEKKEDGATCCLTLPLKLEKWQSDHLEKRFEIARQLYNTLVHAELKKKCQVERMPEYQEIMKMIDTASNQKEKWALEKKRKAFLEENGFSRNAFKADMEKYYKHFNDNIGANVALHGITAQVWIAFDKVFVDNYKQKGKVHFKKPGELCSVQGYSQKKSGGKEIMFREDRIIWNQQGNCDRKKVKREFLLKLSPDNPYEAEMLKRHVKFVRILRKDGKTKPHWYAQLVLEGKPAVKRDPASGAPKHPIGHGVVGIDIGTRTLAYSTDKEVNLLELADRVQNIEQEKRRLQRKMDRSRRATNPENYNPDGTFKRGVKLTRNKSKRYRRIQHQLAMIQHHQADIRKQQHNELANYLLTLGDCFFVENMSYCDLVHRANKTEISEKTGRYKRKKRFGKSIANKAPAMLITMLKQKCQSRGLKGVKEVDTHVRASQYNHQTDTCIEKALENRWNVMPDGERIQRDLYSAFLLQHCKQGLPEYNRKELKKEFGEELYRVFDREALQRDYPQFVAYHHMTIQRLSELPHTIPSMGIRRIIS

SEQ ID NO: 1987 - protein, 482 aa, unidentified
  REGION 1..482: note = Category: MG81 effectors
  REGION 1..482: note = Description: MG81-265 effector
  source 1..482: note = uncultivated organism sequence
MPEYQEIMKMIDTASNQKEKWALEKKRKAFLEENGFSRNAFKADMEKYYKHFNDNIGANVALHGITAQVWIAFDKVFVDNYKQKGKVHFKKPGELCSVQGYSQKKSGGKEIMFREDRIIWNQQGNRDRKKVKREFLLKLSPDNPYEAEMLKRHVKFVRILRKDGKTKPHWYAQLVLEGKPAVKRDPASGAPKHPIGHGVVGIDIGTRTLAYSTDKEVNLLELADRVQNIEQEKRRLQRKMDRSRRATNPENYNPDGTFKRGVKLTRNKSKRYRRIQHQLAMIQHHQADIRKQQHNELANYLLTLGDCFFVENMSYCDLVHRANKTEISEKTGRYKRKKRFGKSIANKAPAMLITMLKQKCQSRGLKGVKEVDTHVRASQYNHQTDTCIEKALENRWNVMPDGERIQRDLYPAFLLQHCKQGLPEYNRKELKKEFGEELYRVFDREALQRDYPQFVAYHHMTIQRLSELPHTIPSMGIRRIIS

SEQ ID NO: 1988 - protein, 512 aa, unidentified
  REGION 1..512: note = Category: MG81 effectors
  REGION 1..512: note = Description: MG81-266 effector
  source 1..512: note = uncultivated organism sequence
MPTKQKEDSNRCVLTLPLLTEPWQEHKKKKRFKIIEHLKNQLISIELRKLKKLQRTKAYKNLIKQIESVPKSERTALYKERNKMLKDAGFSQYTFMDDMAGKKSLMQKHFESHINVQIAHKAAIDVWSSFEKFLFGTGQIVHYQKRGTLSSVASKSPKTGMFYYPDENIFKWSGGGTKPKGGIILCLRVASVKTNYEKEMVANNEIKYYRVVRKWMKTKYKYYLQITFAGKPADKHREISTGRVGIDIGTQTIAIASDKSVKLLELADKVNKNHIKKCELQRKLDRSRRYTNPDNFNPDGTVKRGTKGHKLKWNKSKHYLEIAGKIRELERKNADIRKYQHTCLANDILAMGNQIYIEPMNYKGLQKRAKETQVDEKGRYKKKKRFGKSLANKAPAMFVTILKTKAEQHGGEVYEVDIMSYRASQCDHTTGEYTKHGLNDRWRILGNGDKVQRDLYSAFLIKNSNKTHDEIDLDKCSKTYDSFKKLHDKEIENIRNEVILRKRRNISSYGIA

SEQ ID NO: 1989 - protein, 534 aa, unidentified
  REGION 1..534: note = Category: MG81 effectors
  REGION 1..534: note = Description: MG81-267 effector
  source 1..534: note = uncultivated organism sequence
MGWKSKGRGGKRVKKSSTDTCCLTLPLKLEKWQSDRLEKRFEIGRQIYNTVVRAELKKLHQVERTPQYREIEQKLKEAKQEEAKELWKKRTQLLSKSGFSEYGFKSDMKYYYQHFKENIGSSVAVHGIASQVWTAFEKVLFSKDGKMVHFKKKGELSSLRGYSQAGKSGGIEIIFRGSYVEWKGLKLPLKLSSNNDYETEMLSKRVKYVRILRKEGKTKPHWYAQLVLEGKPAIKRDPASGAPKHPVGHGVVGIDIGTRTLAYSADSKVDLIELADRVQNIELEKMLLQRKLDRSRRATNPENYKPDGTIKKGVKLTRNKSKRYRKIQHQLAMLQHRQADIRKRQHNELANYLLTLGDCFFVEDMDYRALTRKAKKTEISEKTGRYKRKKRFGKSIANKAPSMLIALLDQKCKSLNLEGVKKVDTAVKASQYNHQTDECKAKELKERWNIMPDGERIQRDLYSAFLLQHCRRDLPEYNRKKLQEAFGNELYRVFDREALQRDYPKFVEYHRKTIQRLSALPKTIASMGIRRIIS

SEQ ID NO: 1990 - protein, 521 aa, unidentified
  REGION 1..521: note = Category: MG81 effectors
  REGION 1..521: note = Description: MG81-268 effector
  source 1..521: note = uncultivated organism sequence
MMVMWKGGIPVGKSSTDTCCLTLPLKLEKWQEDRLAKRFEIARQIYNTMVRAELKKLDRVKQLPEYRKNQKEIQALDWKNSADKQRLKELYGNQRKILQKQGFTEYGFKADSKDYYKHFIENIGSSVATHGIAPQVWNAFDKMLFQKDGKVVHFKRYGDVHSLKGGSVAHKSGGAEIMFRKTYIEWKGLKLPLKLSPNNAYEAEMLSYRVKYVRILRTRGKTKDRWYAQLSLEGKPAVKYDSNTGKPVHPVGRGAVGLDIGPQTLAYAGANEANLVELADQVQNIEQEKRRLQRKLDRSRRATNPDNYNENGTIRRGVKLTHNKSKRYCKLQKELSWIQHCQAETRKRQHIALANHLLSLGDCFYVEPMAWPSLTHRAKKTEVSEETGRIKRKKRFGKSVANKAPASLIGILKLKCISLGLTGVVEVPMLLRASQYNHQSKDYAKKSLSQRWNDMPDGNRIQRDLYSAFLLQHYDSRSESFDQETLERDYPQFVRLHNQTIQRLSALPKTPSSMGIRRSVS

SEQ ID NO: 1991 - protein, 529 aa, unidentified
  REGION 1..529: note = Category: MG81 effectors
  REGION 1..529: note = Description: MG81-269 effector
  source 1..529: note = uncultivated organism sequence
MAKNNNNNNNNTDTCVLTLPLRVEKWQEDCLLKRFEAARRIYNSLLNFELKKLRQLERTVEYRQIQSVISSAYRSNTKDSPECKDAFKRREKLISANGISENGFKSDVKFFYKHFDGLIGSNVAVHCIAVQLWAAFDKYLSGSGKEIHFKRLGDISSLKGYSVKGKSGGCEIIFRGQYVEWTRKKKKLLLPLKIDPDNEYEREMLSRRVKYVRIIKKPGKNRLRWYAQLTLEGKPALKYSAETGKPIHSVGKGNVGIDIGPQTVAYASDKEVALLELADRVTNIEHQKKKLQRKLDRSRRATNPDNYKPDGTIKCGVKLTRNKSKRYLKLQSKLAYIQHRQAEIRKLQHTCLANHMLTLGDRFFVEKMNWPGLAHRAKETSISEKTGRYKRKKRFGKSLANKAPAMFISILKRKCETLGLPGVVEVDTFRLRASQYNHLSDTYEKKSLSERWNYMPISDGSDSSKTKRIQRDLYSAFLLQHTIPQPCSFDKEALRIDYPNFVIMHDAEIHRLESLPKTITSMGVRRSHS

SEQ ID NO: 1992 - protein, 512 aa, unidentified
  REGION 1..512: note = Category: MG81 effectors
  REGION 1..512: note = Description: MG81-270 effector
  source 1..512: note = uncultivated organism sequence
MKKSSTDTCCLTLALKLEKWQEDRLAKRFEIARQLYNTLVHAELKRLVQIKRTAEYLENEQKIRALDRNNPADRAKLQELYKEQRKSLKTAGFTDYSFTTDMGKYYKHFRDNIGSSVAVHGIAPQVWAAFDKVLFKKGGKKVHYKRPGEVNSVQGYSRTGKSGGREIMFRGPYIEWKGLKLPLKLSPDNAYETDMLQRRVKLVRLVRRPGKRRDRWYAQLVLEGKPAIKADPVTGKAVHPIGSGPVGLDIGPQTLAYSAARVAGLVELADRVQNIEQEKRCLQRKMDRSRRAANPDNYAEDGTIRRGVKLTHNKSKRYRRSQQELKYLQHRQVEIRKLQHIQLANHLLSLGDHFYVEKMEWSSLTHRAKKTVISEKTGKPRSKKRFGKSIANKAPAMLIEILRQKCKSLGLPNVVEINPADIKASQYNHLTGEYVKKSLSRRWNEMQDGEHLQRDLYSAFLLQHYDSMSKALDLDSLARDYPAFVQYHHREIERLHALPKTPSSMGIRRSIA

SEQ ID NO: 1993 - protein, 511 aa, unidentified
  REGION 1..511: note = Category: MG81 effectors
  REGION 1..511: note = Description: MG81-271 effector
  source 1..511: note = uncultivated organism sequence
MKKSNTDTCCLTLPLKLEKWQEDRLAKRFEIARQIYNTMVHAELKKLRNIENSQPYRQIQKQIEALNWKNQNDKARLKSLYNDRNKLLNTIGFSEYGFKADIKYYYKHFNDNIGSSVAVHGIAPQVWAAFEKMLFHKEGKKVHYKKKDDIHSLHGYSVTGKSGGVGIIFRKTYIEWKGLKLPLKRSPDNAYETEMLGRRVKYVRLLRKPGKRKDCWYAQLSLEGKPAIKRDPESGKRRHSIGRGAVGLDIGPQTLAYSACGAADLVELADQVQNIEQMKRRLQRKLDRSRRATNPDNYADNGTIRRGVKLTHNKSNRYRRTQRELRYLQHCQAEIRKRQHIELANHLLALGDCFYVEDMAWPSLTHRAKETAISEKTGRIKRKKRFGKSVANKAPATLIGILEQKCNSLGLPGVVKVPTSLRASQYNHQSGEYTSKPLSQRWNNMPDGERIQRDLYSAFLLQHYDPKAGNFDSALLQQDYPQFVQYHHRAIQRLSTVPKTLSSMGIQRSLR

SEQ ID NO: 1994 - protein, 548 aa, unidentified
  REGION 1..548: note = Category: MG81 effectors
  REGION 1..548: note = Description: MG81-272 effector
  source 1..548: note = uncultivated organism sequence
MGWKSKGRGGTRVNNEEKEKDGATCCLTLPLKLEKWQSDHLEKRFEIARQLYNTLVHAELKRIHRIERMPEYREIERLIEATTDKKEKWALKNQKKQFLRKNGINRNTFTMDMKRLYKHFNDNIGSNVAQHGIVSQVLTAFEKVYIENQSGEVHFKKPGDLRSVQGYSQKKSGGVEIMFREGKIIWNQQGNNDRKGVAREFPLKLSPDNSYEAEMLKKHVKFVRILRKEGKTKPHWYAQLVLEGKPAIKRDPASGAPKHPVGHGVVGIDIGTRTLAYSADSKVDLIELADRVQNIEQEKLLLQRKLDRSRRATNPENYKPDGTIKKGVKLTWNNSKRYKRIQHQYAMIQHHQADIRKQQHNELANYLLTLGDCFFVEDMDYRALTRKAKKTEISEKTGRYKRKKRFGKSIANKAPSMLIALLDQKCKSLNLEGVKKVDTAVKASQYNHQTDECKAKELKERWNIMPDGERIQRDLYSAFLLQHCRRDLPEYNRKKLQETFGNELYRIFDREALQRDYPKFVEYHRETIQRLSALPKTIASMGIRRSIS

SEQ ID NO: 1995 - protein, 1387 aa, unidentified
  REGION 1..1387: note = Category: MG81 effectors
  REGION 1..1387: note = Description: MG81-273 effector
  source 1..1387: note = uncultivated organism sequence
MKLTKVEKARIAVSREKKDSGRIILYTNPEDVKKTSVTTMEQQVSKRIDQANKLYQVFFKSVIPVELNKHFAEISKIAAKCRNTEEFYKKACGYSGYEWTDAKQKKRTSQISRFSYTSSGKNMYVVMDNFVKEYMVQIWQEKDFRNAAVKILCCICDGKKFASKLEKVKKESPDTLKKFIEISGKCEGNPFVDYDTSFLEKVFTLVISQMVKNCDRKSYEQDDKEKIKKSIQKEIQWLSHVQSVTERSFGREGKTYLLFKIRNPYATEERLQTVLIRMRKTLKRGRNRDIAIVLLQGLAQMNQVTFTDTVKHLYQEEEKAFCDFIDAVNRDYYRVNIVKSVRNMDVKVQPDLNDNSILKLSGLGNIKKEALSDTLLRYAASADESDQVLLDIKKLLFEYFLPENSKETSKYTTVQNLWNIPYLPKIFFDYGFENEDSDDDNECAEDIETLCDVEPQYKINQHSLKRRIRYVNYGKYLQMTKNESDRERRYWIHYIKEFVEKNYVDSGRTLSEKNCYASSMMLNCWKEIIRYLCGKYIDIGKAVFHFTNLTAMPKPKDKIIYGQLEEQYKKGISSFDYEAIKAEETLQRDIVQSVVAAAFAFSKSVIDETKMEECQETNKEDILFLSENVLGSLLKENTIKLILRFYGGESSVAQKEYFDQQEIVQEMISHLKSIRNENFHYLDGAKKDNPHKYASILWKNDEMAYQKLTKQRYYANNVGLFYRAEEIQELVQELYSQKNITEAQIPAFRTVLKRKDLPGYMEELGILFPDNTQEKSKGDFEGTLYFLMKEIYYRDFIVKDKAAAYFFKAVDQNKEQSKKEDKHTERAAENFHRYVKSLEKKYNKKEISFGTVCQYIMMEYNQQNTTKQETEIYKHFKMLISLCIRKAFGNYIKETYRFLFHPIYSKQQGEPEYLDTLELESGVKEKNYEWFTLAHFLHPVQLNHLVGDLKSYIQYREDILRRIVFAEQRVYADQQKEVQQKVKTAKEILEVLEFVREVSGRVSNEYTDYYENEEEYAEFLYQYIDFRKREGKSAFESLKYFCQNILDSGTVVDLYADTENPKVLRNIELTRMYAGSNVKIPEYEKITEDEIKMYYQEKNSVALILSRGLCRNEKEQKKVIEFNWKKKRLTLNEITDVFSLVNDLLGKMISFSYLRERDQMYLLLGFYYMALCAENKSENHLGWKGETLDKLESSDSKFDIGGGLVLYQIVSAFNFGSKLLYISEDGRWKMAGGAFPGKYGRFENDYNHRTSLSKVIRLFENESYEREIIYWRDYVDHMKYYVNQNQSIMEIYSAFYSKVLGYSAKLRKSVVFNLQAALEKHHINPECIWMTSDGKCADIKLMKNLESQKFTYKLAKREGEKTERKICMNALNENFLKTIRTSLEYKK

SEQ ID NO: 1996 - protein, 536 aa, unidentified
  REGION 1..536: note = Category: MG81 effectors
  REGION 1..536: note = Description: MG81-274 effector
  source 1..536: note = uncultivated organism sequence
MNNEEKEKDGATCCLTLPLKLEKWQSDHLEKRFEIARQLYNTLVHAELKRIHRIERMPEYREIERLIEATTDKKEKWALKNQKKQFLRKNGINRNTFTTDMKRLYKHFNDNIGSNVAQHGIVSQVLTAFEKVYIENQSGEVHFKKPGDLRSVQGYSQKKSGGVEIMFREGKIIWNQQGNNDRKGVAREFPLKLSPDNSYEAEMLKKHVKFVRILRKEGKTKPHWYAQLVLEGKPTVKRDPISGAPKHPVGHGVVGIDIGTRTLAYSTDSEVNLLELADRVQNIEQEKRRLQRKMDRSRRAMNPENYNSDGTFKRGVKLTRNKSKRYRRIQHQLAMIQHHQADIRKQQHNELANYLLTLGDCFFVENMSYCDLVHRANKTEISEKTGRYKRKKRFGKSIANKAPAMLITMLKQKCQSRGLEGVKEVDTHVRASQYNHQTDTCIEKALENRWNVMPDGERIQRDLYSAFLLQHCKQGLPEYDRKELKKEFGEELYRVFDREALQRDYPQFVAYHHMTIQRLSELPHTIPSMGIRRIIS

SEQ ID NO: 1997 - protein, 550 aa, unidentified
  REGION 1..550: note = Category: MG81 effectors
  REGION 1..550: note = Description: MG81-275 effector
  source 1..550: note = uncultivated organism sequence
MGWKSKGRGGTLVDNEEKKEDGATCCLTLPLKLEKWQSDHLEKRFEIARQLYNTLVHAELKKKCQVERMPEYQEIMKMIDTASNQKEKWALEKKRKAFLEENGFIRNAFKADMEKYYKHFNDNIGANVALHGITAQVWIAFDKVFVDNYKQKGKVHFKKPGELCSVQGYSQKKSGGKEIMFREDRIIWNQQGNRDRKKVKREFLLKLSPDNPYEAEMLKRHVKFVRILRKDGKTKPHWYAQLVLEGKPAVKRDPASGAPKHPIGHGVVGIDIGTRTLAYSTDKEVNLLELADRVQNIEQEKRRLQRKMDRSRRATNPENYNPDGTFKRGVKLTRNKSKRYKRIQHQYAMIQHHQADIRKQQHNELANYLLTLGDCFFVENMSYCDLVHRANKTEISEKTGRYKRKKRFGKSIANKAPAMLITMLKQKCQSRGLEGVKEVDTHVCASQYNHQTDTCIKKALENRWNIMPDGERIQRDLYSAFLLQHCRRDLPEYNRKELQKEFGEELYRVFDREALQRDYPQFVAYHHMTIQRLSELPHTIPSMGIRRIIS

SEQ ID NO: 1998 - protein, 511 aa, unidentified
  REGION 1..511: note = Category: MG81 effectors
  REGION 1..511: note = Description: MG81-276 effector
  source 1..511: note = uncultivated organism sequence
MKRSGTDTCCLTLPLRLEKWQEDRLAKRFEIARQIYNTMVRAELKKLRKMELSQPYRSIQEQIKALDWKNQNDKQQLRSLYNERDQLLKKNGFTEYGFKSDIKYYYKYFNDNIGSSVAVHGIAPQVWAAFEKMLFRKEGKKVHYKKKDDIHSLRGYSVTGKSGGVEIIFHETYIEWKGLKLPLKLSPHNAYETEMLSRRVKYVRLLRKPGKRKDRWYAQLSLEGKPAIKHNPASGELRHPVGQGAVGLDIGPQTLAYSACCAADLVELADRVQNIEQVKRLLLRKMDRSRRATNPDNYTDDGTIRRGVKLTHNKSKRYQRTQRELRYLQHCQAEMRKRQHIELANHLLTLGDRFYVEDMAWPSLTRRAKETAISEKTGKIKRKKRFGKSIANKAPAALIGILEQKCYSLGLPGVVKVPTSLKASQYNHQSGEYTPKPLSRRWNNMPDGERIQRDLYSAFLLQHYDPQTGNFDPVLLQQDYPQFVQYHHCAIQRLSAMPRTLSSMGIQRSLR

SEQ ID NO: 1999 - protein, 534 aa, unidentified
  REGION 1..534: note = Category: MG81 effectors
  REGION 1..534: note = Description: MG81-277 effector
  source 1..534: note = uncultivated organism sequence
MGWKSKGRGGTLVKKSSTDTCCLTLPLKLEKWQSDRLEKRFEIGRQIYNTIVHAELKKLRKLERTQQYQEIEQKLENAKQEETKELWKKKRQLLDQNGLSENHFKADMKYYYPHFKDNIASSVAVHGIASQAWTAFEKVLLSKDGKMVHFKKKGELSSLRGYSQAGKSGGIEIIFRGSYVEWKGLKLPLQLSPNNEYETEMLSKRVKYVRILRKDGKTKTHWYAQLALEGKPAVKRDSISGAPKHPVGHGVVGIDIGTRTLAYSADSKVDLIELADRVQNIEQEKMLLQRKLDRSRRATNPENYKPDGSIKQGVKLTWNNSKRYKRIQHQYAMIQHHQADIRKQQHNELANYLLTLGDCFFVEDMDYRALTRKAKKTEISEKTGRYKRKKRFGKSIANKAPSMLIALLDQKCKSLNLEGVKKVDTAVKASQYNHQTDECKAKELKERWNIMPDGERIQRDLYSAFLLQHCRRDLPEYNRKKLQETFGNELYRVFDREALQRDYPKFVEYHRETIQRLSALPKTIASMGIRRIIS

SEQ ID NO: 2000 - protein, 499 aa, unidentified
  REGION 1..499: note = Category: MG81 effectors
  REGION 1..499: note = Description: MG81-278 effector
  source 1..499: note = uncultivated organism sequence
MAKGKKKNQSVRCVLTLPLLTEPWQDKIIETRFHIMERIKNILISKELGKLKSLERTREWKKLKKDIEKCKEKDEEEKKILYEQRSKMIYDAGLSKNHFVVDITPIQKHFAEHIATQIAHMSASDVWRSFEKYFYGSGQRIHFVEYDKLNSIACEKIGNGMNLKDWKLVWGGGRCPNKISLTIKVRLPRNDYEREMMQKPIKYLRVVRKWMKTRYKYYLQITFEGNPVIKSRPVGNGRVGIDIGTQTIAWSSDTEVRLAELAAGIKQNQKKIAELKRKMDRSRRAMNPQNYNSNGTAKRGRHKWVKSKRYIRMRGILRELERKNADIRKYEHTCMVNHILSLGNQIYIEDMNWIALARRAKRTKKNKNGRYAKKKRFGKSIGKRAPGMFMLILKQKCNLVGGEYHEVDKSTFKASQYDHITDTFRKKPLGKRWNVLGGTDNVQRDMYSSFLIKNSDDTYMQTDRNRCIDTYTHFKELHDIEIERLMNENKKHLSSMGVA

SEQ ID NO: 2001 - protein, 551 aa, unidentified
  REGION 1..551: note = Category: MG81 effectors
  REGION 1..551: note = Description: MG81-279 effector
  source 1..551: note = uncultivated organism sequence
MSNLLFLLENEEKMRYNGVEKQREGEGTRVKRSSTDTCCLTLPLKLEKWQSDRLEKRFEIGRQIYNTIVHAELKKLRKLERTQQYQEIEQKLENAKQEETKELWKKKRQLLDQNGLSENHFKADMKYYYPHFKDNIASSVAVHGIASQAWTAFEKVLLSKDGKMVHFKKKGELSSLRGYSQAGKSGGIEIIFRGSYVEWKGLKLPLQLSPNNEYETEMLSKRVKYVRILRKDGKTKTHWYAQLALEGKPAVKRDSISGAPKHPVGHGVVGIDIGTRTLAYSTDSEVNLLELADRVQNIEQEKRRLQRKMDRSRRAMNPGNYKPDGSIKQGVKLTWNNSKRYKRIQHQYAMIQHHQADIRKQQHNELANYLLTLGDCFFVENMSYCDLVHRANKTEISEKTGRYKRKKRFGKSIANKAPAMLITMLKQKCQSRGLKGVKEVDTHVRASQYNHQTDTCIEKALENRWNVMPDGERIQRDLYSAFLLQHCRRDLPEYNRKELQKEFGEELYRVFDREALQRDYPQFVAYHHMTIQRLSELPHTIPSMGIRRIIS

SEQ ID NO: 2002 - protein, 522 aa, unidentified
  REGION 1..522: note = Category: MG81 effectors
  REGION 1..522: note = Description: MG81-280 effector
  source 1..522: note = uncultivated organism sequence
MKRSSTDTCCLTLPLKLEKWQSDRLEKRFEIGRQIYNTIVHAELKKLRKLERTQQYQEIEQKLENAKQEETKELWKKKRQLLDQNGLSENHFKADMKYYYPHFKDNIASSVAVHGIASQAWTAFEKVLLSKDGKMVHFKKKGELSSLRGYSQAGKSGGIEIIFRGSYVEWKGLKLPLQLSPNNEYETEMLSKRVKYVRILRKEGKTKTHWYAQLALEGKPAVKRDSISGAPKHPVGHGVVGIDIGTRTLAYSTDSEVNLLELADRVQNIEQEKRRLQRKMDRSRRAMNPGNYKPDGSIKQGVKLTWNNSKRYKRIQHQYAMIQHHQADIRKQQHNELANYLLTLGDCFFVEDMDYRALTRKAKKTEISEKTGRYKRKKRFGKSIANKAPSMLIALLDQKCKSLNLEGVKKVDTAVKASQYNHQTDECKAKELKERWNIMPDGERIQRDLYSAFLLQHCRRDLPEYNRKKLQETFGNELYRVFDREALQRDYPKFVEYHRETIQRLSALPKTIASMGIRRIIS

SEQ ID NO: 2003 - protein, 538 aa, unidentified
  REGION 1..538: note = Category: MG81 effectors
  REGION 1..538: note = Description: MG81-281 effector
  source 1..538: note = uncultivated organism sequence
MNNEEKEKEGATCCLTLPLKLEKWQSDHLEKRFEIARQLYNTLVHAELKKKCQVERMPEYQEIMKMIDTASNQKEKWALEKKRKAFLEENGFSRNAFKADMEKYYKHFNDNIGANVALHGITAQVWIAFDKVFVDNYKQKGKVHFKKPGELCSVQGYSQKKSGGKEIMFREDRIIWNQQGNRDRKKVKREFLLKLSPDNPYEAEMLKRHVKFVRILCKDGKTKPHWYAQLVLEGKPAVKRDPISSAPKHPVGHGVVGIDIGTRTLAYSTDKEVNLLELADHVQNIEQEKRRLQRKMDRSRRATNPENYNPDGTFKRGVKLTRNKSKRYRRIQHQLAMIQHHQADIRKQQHNELANYLLTLGDCFFVENMSYCDLVHRANKTEISEKTGRYKRKKRFGKSIANKAPAMLITMLKQKCQSRGLKGVKEVDTHVRASQYNHQTDTCIEKALENRWNVMPDGERIQRDLYSAFLLQHCKQGLPEYNRKELKKEFGEELYRVFDREALQRDYPQFVAYHHMTIQRLSELPHTIPSMGIRRIIS

SEQ ID NO: 2004 - protein, 550 aa, unidentified
  REGION 1..550: note = Category: MG81 effectors
  REGION 1..550: note = Description: MG81-282 effector
  source 1..550: note = uncultivated organism sequence
MGRKSTGRGGTRVNNEEKEKDGATCCLTLPLKLEKWQSDHLEKRFEIARQLYNTLVHAELKKKCQVVRMPEYQEIMKMIDAASNQKEKWALEKKRKAFLGENGFSRNAFKADMEKYYKHFNDNIGANVALHGITAQVWIAFDKVFVDNYKQKGKVHFKKPGELCSVQGYSQKKSGGKEIMFREDRIIWNQQGNRDRKKVKREFLLKLSPDNPYEAEMLKRHVKFVRILRKDGKTKPHWYAQLVLEGKPAVKRDPISSAPKHPVGHGVVGIDIGTRTLAYSTDKEVNLLELADRVQNIEQEKRRLQRKMDRSRRAMNPENYNSDGTFKRGVKLTRNKSKRYRRIQHQLAMIQHHQADIRKQQHNELANYLLTLGDCFFVENMSYCDLVHRANKTEISEKTGRYKRKKRFGKSIANKAPAMLITMLKQKCQSRGLEGVKEVDTHVRASQYNHQTDTCIEKALENRWNVMPDGERIQRDLYSAFLLQHCKQGLPEYNRKELKKEFGEELYRVFDREALQRDYPQFVAYHHMTIQRLSELPHTIPSMGIRRIIS

SEQ ID NO: 2005 - protein, 1387 aa, unidentified
  REGION 1..1387: note = Category: MG81 effectors
  REGION 1..1387: note = Description: MG81-283 effector
  source 1..1387: note = uncultivated organism sequence
MKLTKVEKARIAVSREKKDSGRIILYTNPEDVKKTSVTTMEQQVSKRIDQANKLYQVFFKSVIPVELNKHFAEISKIAAKCRNTEEFYKKACGYSGYEWTDAKQKKRTSQISRFSYTSSGKNMYVVMDNFVKEYMVQIWQEKDFRNAAVKILCCICDGKKFASKLEKVKKESPDTLKKFIEISGKCEENPFVDYDTSFLEKVFTLVISQMVKNCDRKSYEQDDKEKIKKSIQKEIQWLSHVQSVTERSFGREGKTYLLFKIRNPYATEERLQTVLIRMRKTLKRGRNRDIAIVLLQGLAQMNQVTFTDTVKHLYQEEEKAFCDFIDAVNRDYYRVNIVKSVRNMDVKVQPDLNDNSILKLSGLGNIKKEALSDTLLRYAASADESDQVLLDIKKLLFEYFLPENSKETSKYTTVQNLWNIPYLPKIFFDYGFENEDFDDDNECAEDIETLCDVEPQYKINQHSLKRRIRYVNYGKYLQMTKNESDRERRYWIHYIKEFVEKNYVDSGRTLSEKNCYASSMMLNCWKEIIRYLCGKYIDIGKAVFHFTNLTAMPKPKDKIIYGQLEEQYKKGISSFDYEAIKAEETLQRDIVQSVVAAAFAFSKSVIDETKMEECQETNKEDILFLSENVLGSLLKENTIKLILRFYGGESTVAQKEYFDQQEIVQEMISHLKSIRNENFHYLDGAKKDNPHKYASILWKNDEMAYQKLTKQRYYANNVGLFYRAEEIQELVQELYSQKNITEAQIPAFRTVLKRKDLPGYMEELGILFPDNTQEKSKGDFEGTLYFLMKEIYYRDFIVKDKAAAYFFKAVDQNKEQSKKEDKHTERAAENFHRYVKSLEKKYNKKEISFGTVCQYIMMEYNQQNTTKQETEIYKHFKMLISLCIRKAFGNYIKETYRFLFHPIYSKQQGEPEYLDTLELESGVKEKNYEWFTLAHFLHPVQLNHLVGDLKSYIQYREDILRRIVFAEQRVYADQQKEVQQKVKTAKEILEVLEFVREVSGRVSNEYTDYYENEEEYAEFLYQYIDFRKREGKSAFESLKYFCQNILDSGTVVDLYADTENPKVLRNIELTRMYAGSNVKIPEYEKITEDEIKMYYQEKNSVALILSRGLCRNEKEQKKVIEFNWKKKRLTLNEITDVFSLVNDLLGKMISFSYLRERDQMYLLLGFYYMALCAENKSENHLGWKGETLDKLESSDSKFDIGGGLVLYQIVSAFNFGSKLLYISEDGRWKMAGGAFPGKYGRFENDYNHRTSLSKVIRLFENESYEREIIYWRDYVDHMKYYVNQNQSIMEIYSAFYSKVLGYSAKLRKSVVFNLQAALEKHHINPECIWMTSDGKCADIKLMKNLESQKFTYKLAKREGEKTERKICMNALNENFLKTIRTSLEYKK

SEQ ID NO: 2006 - protein, 536 aa, unidentified
  REGION 1..536: note = Category: MG81 effectors
  REGION 1..536: note = Description: MG81-284 effector
  source 1..536: note = uncultivated organism sequence
MNNEEKEKDGATCCLTLPLKLEKWQSDHLEKRFEIARQLYNTLVHAELKRIHRIERMPEYREIERLIEATTDKKEKWALKNQKKQFLRKNGINRNTFTTDMKRLYKHFNDNIGSNVAQHGIVSQVLTAFEKVYIENQSGEVHFKKPGDLRSVQGYSQKKSGGVEIMFREGKIIWNQQGNNDRKGVAREFPLKLSPDNSYEAEMLKKHVKFVRILRKDGKTKPHWYAQLVLEGKPAIKRDPASGAPKHPIGHGVVGIDIGTRTLAYSADSKVDLIELADRVQNIEQEKLLLQRKLDRSRRATNPENYKPDGTIKKGVKLTWNNSKRYKRIQHQYAMIQHHQADIRKQQHNELANYLLTLGDCFFVEDMDYRALTRKAKETEISEKTGRYKRKKRFGKSIANKAPSMLITLLDQKCKSLNLEGVKKVDTAVKASQYNHQTDECKAKELKERWNIMPDGERIQRDLYSAFLLQHCRRDLPEYNRKKLQEAFGNELYRVFDREALQRDYPKFVEYHRKTIQRLSALPKTIASMGIRRSIS

SEQ ID NO: 2007 - protein, 522 aa, unidentified
  REGION 1..522: note = Category: MG81 effectors
  REGION 1..522: note = Description: MG81-285 effector
  source 1..522: note = uncultivated organism sequence
MKRSSTDTCCLTLPLKLEKWQSDRLEKRFEIGRQIYNTIVHAELKKLRKLERTQQYQEIEQKLENAKQEETKELWKKKRQLLDQNGLSENHFKADMKYYYPHFKDNIASSVAVHGIASQAWTAFEKVLLSKDGKMVHFKKKGELSSLRGYSQAGKSGGIEIIFRGSYVEWKGLKLPLQLSPNNEYETEMLSKRVKYVRILRKEGKTKTHWYAQLALEGKPAVKRDSISGAPKHPVGHGVVGIDIGTRTLAYSTDSEVNLLELADRVQNIEQEKRRLQRKMDRSRRATNPENYNPDGTFKRGVKLTRNKSKRYRRIQHQLAMIQHHQADIRKQQHNELANYLLTLGDCFFVENMSYCDLVHRANKTEISEKTGRYKRKKRFGKSIANKAPAMLITMLKQKCQSRGLKGVKEVDTHVRASQYNHQTDTCIEKALENRWNVMPDGERIQRDLYSAFLLQHCKQGLPEYNRKELKKEFGEELYRVFDREALQRDYPQFVAYHHMTIQRLSELPHTIPSMGIRRIIS

SEQ ID NO: 2008 - protein, 530 aa, unidentified
  REGION 1..530: note = Category: MG81 effectors
  REGION 1..530: note = Description: MG81-286 effector
  source 1..530: note = uncultivated organism sequence
MANNNNNNNNNNTDTCVLTLPLRVEKWQEDCLLKRFEAARRIYNSLLNFELKKLRQLERTVEYRQIQSVISSAYRSNTKDSPECKDAFKRREKLISANGISENGFKSDVKFFYKHFDGLIGSNVAVHCIAVQLWAAFDKYLSGSGKEIHFKRLGDISSLKGYSVKGKSGGREIIFRGQYVEWTRKKKKLLLPLKIDPDNEYEREMLSRRVKYVRIIKKPGKNRLRWYAQLTLEGKPALKYSAETGKPIHSVGKGNVGIDIGPQTVAYASDKEVALLELADRVTNIEHQKKKLQRKLDRSRRATNPDNYKPDGTIKRGVKLTRNKSKRYLKLQSKLAYIQHRQAEIRKLQHTCLANHMLTLGDRFFVEKMNWPSLAHRAKETSISEKTGRYKRKKRFGKSLANKAPAMFISILKRKCETLGLPGVVEVDTYSLKASQYNHLSDTYEKKSLSERWNYMPISDGSDSSKTKRIQRDLYSAFLLQHTIPQPCSFDKEALRIDYPNFVTMHDAEIHRLESLPKTITSMGVRRSHS

SEQ ID NO: 2009 - protein, 550 aa, unidentified
  REGION 1..550: note = Category: MG81 effectors
  REGION 1..550: note = Description: MG81-287 effector
  source 1..550: note = uncultivated organism sequence
MGWKSKGRGGTLVDNEEKKEDGATCCLTLPLKLEKWQSDHLEKRFEIARQLYNTLVHAELKKKCQVERMPEYQEIMKMIDTASNQKEKWALEKKRKAFLEENGFSRNAFKADMEKYYKHFNDNIGANVALHGITAQVWIAFDKVFVDNYKQKGKVHFKKPGELCSVQGYSQKKSGGKEIMFREDGIIWNQQGNRDRKKVKREFLLKLSPDNPYEAEMLKRHVKFVRILRKDGKTKPHWYAQLVLEGKPAVKRDPASGAPKHPIGHGVVGIDIGTRTLAYSTDKEVNLLELADRVQNIEQEKRRLQRKMDRSRRATNPENYNPDGTFKRGVKLTRNKSKRYKRIQHQYAMIQHHQADIRKQQHNELANYLLTLGDCFFVENMSYCDLVHRANKTEISEKTGRYKRKKRFGKSIANKAPAMLITMLKQKCQSRGLEGVKEVDTHVCASQYNHQTDTCIKKALENRWNIMPDGERIQRDLYSAFLLQHCRRDLPEYNRKELQKEFGEELYRVFDREALQRDYPQFVAYHHMTIQRLSELPHTIPSMGIRRIIS

SEQ ID NO: 2010 - protein, 511 aa, unidentified
  REGION 1..511: note = Category: MG81 effectors
  REGION 1..511: note = Description: MG81-288 effector
  source 1..511: note = uncultivated organism sequence
MGKSSTDTCCLTLPLKLEKWQEDRLAKRFEIARQIYNTMVRAELKRLRQVEQSPQYRSNKKAIQALDWKNTADKPKLKTLYRERDKLLKGGGFTKYGFKSDIKNFYKHFAENIGSSVAVHGIAPQVWAAFERVLFKKEGKKVHFKKTGDIRSLRGYSVTGKSGGVEIIFRGSYIEWKGLNLPLKLSPDNAYETEMLSYRVKYVRILRKPGKTRDRWYAQLSLEGKPAIKRNPASGNPVHPVGQGTVGLDIGPQTLAYAAEKEANLVELADRVQNIEREKHLLQRKMDRSRRAANPDNYAENGTIRRGVKLTHNKSKRYLRLQRELCYLQHCQAETRKRQHTELANHLLSLGSCFYVEDMAWPSLTHRAKKTEISDKTGRIKRKKRFGKSIANKAPAALINILRTKCVSLGIPGVVEVPTSLKASQYNHQSKEYTPKPLSQRWNDMPDGSRIQRDLYSAFLLQHYDPQSGNFDQASLEADYPQFVQLHNQSIQRLLTVPKTPSSMGIRRSVS

SEQ ID NO: 2011 - protein, 532 aa, unidentified
  REGION 1..532: note = Category: MG81 effectors
  REGION 1..532: note = Description: MG81-289 effector
  source 1..532: note = uncultivated organism sequence
MILLAKNNNNNNNNTDTCVLTLPLRVEKWQEDCLLKRFEAARRIYNSLLNFELKKLRQLERTVEYRQIQSVISSAYRSNTKDSPECKDAFKRREKLISANGISEYGFKSDVKFFYKHFDGLIGSNVAVHCIAVQLWAAFDKYLRGSGKEIHFKRLGDISSLKGYSVKGKSGGCEIIFRGQYIEWTRKKKKLLLPLKIDPDNEYEREMLSRRVKYVRIIKKPGKNRLRWYAQLTLEGKPALKYSAETGKPIHSVGKGNVGIDIGPQTVAYASDKEVALLELADRVTNIEHQKKKLQRKLDRSRRATNPDNYKPDGTIKRGVKLTRNKSKRYLKLQSKLAYIQHRQAEIRKLQHTCLANHMLTLGDRFFVEKMNWPGLAHRAKETSISEKTGRYKRKKRFGKSLANKAPAMFISILKRKCETLGLPGVVEVDTYSLKASQYNHLSDTYEKKSLSERWNYMPISDGSDSSKTKRIQRDLYSAFLLQHTIPQPCSFDKKALRIDYPNFVTMHDAEIHRLESLPKTITSMGVRRSHS

SEQ ID NO: 2012 - protein, 512 aa, unidentified
  REGION 1..512: note = Category: MG81 effectors
  REGION 1..512: note = Description: MG81-290 effector
  source 1..512: note = uncultivated organism sequence
MPTKQKEDSNRCVLTLPLLTEPWQEHIIEKRFKIIEHLKNQLISIELRKLKNLQRTKAYKNLMKRIESVPKAERTALYKERNKMLEGKGFSQYTFMDDMAGKKSLMQKHFESHINVQIAHKAAIDVWSSFEKFLFGSGQMIHYQKRGTLSSVASKSPKTGMFYYSDENIFKWSGGGTKPKGGIILCLRVASVKTNYEKEMVANNEIKYYRVVRKWMKTKYKYYLQITFAGKPADKHREISTGRVGIDIGTQTIAIASDKSVKLLELADKVNKNHIKKCELQRKLDRSRRYTNPDNFNPDGTVKRGTKGHKLKWNKSKHYIEIAGKIRELERKNADIRKYQHTCLANDILAMGNQIYIEPMNYKGLQKRAKETQVDEKGRYKKKKRFGKSLANKAPAMFVTILKTKAEQHGGEVYEVDIMSYRASQCDHTTGEYTKHGLNDRWRILGNGDKVQRDLYSAFLIKNSNKTHDEIDLDKCSKTYDNFKKLHDKEIENIRNEVKLRERKNISSYGIA

SEQ ID NO: 2013 - protein, 467 aa, unidentified
  REGION 1..467: note = Category: MG81 effectors
  REGION 1..467: note = Description: MG81-291 effector
  source 1..467: note = uncultivated organism sequence
MAKCSTDTCCLTLPLRLEKWQEDRLAKRFEIARQIYNTMVRAELKKLRAMEQSEPYKANQEKIQALDRKTQTDKQALKALYKERDKLLRDGGFSEYGFKSDIKNYYKHFNNNIGSNVAFHGIAPQVWAAFEKMLFKKEGKKVHFKKKGDIRSLRGYSVTGKSGGVEIIFRETYIEWKGLKLPLKLSPDNIYETQMLSYRVKYVRLLRKPGKRKDRWYAQLSLEGKPVIKYNPKTGEVRHPIGKGAVGLDIGPQTLAYSAATGADLVELANQVQNVEQEKRRLQRKLDRSRRATNPGNYANDGTIRRGIALTHNQSKRYLRTQQELKYLQHQQAEIRKRQHTELANHLLSLGDCFYVEKMVWTSLTHRAKETEISEKTGKIKRKKRFGKSVANKAPATLIGILQRKSAALGIPGVIEVPTSVKASQYNHQSGTYTPKPLSQRWNNMPDGERIQLRIFITALRPANKHF

SEQ ID NO: 2014 - protein, 511 aa, unidentified
  REGION 1..511: note = Category: MG81 effectors
  REGION 1..511: note = Description: MG81-292 effector
  source 1..511: note = uncultivated organism sequence
MAKCSTDTCCLTLPLRLEKWQEDRLAKRFEIARQIYNTMVRAELKKLRAMEQSEPYKANQEKIQALDWKTQTDKQALKALYKERDKLLRDGGFSEYGFKSDIKNYYKHFNNNIGSNVAFHGIAPQVWAAFEKMLFKKEGKKVHFKKKGDIHSLRGYSAAGKSGGVEIIFRETYIEWKGLKLPLKLSPDNIYETQMLSYRVKYVRLLRKPGKRKDRWYAQLSLEGKPVIKYNPKTGEVRHPIGKGAVGLDIGPQTLAYSAATGADLVELANQVQNVEQEKRRLQRKLDRSRRATNPGNYADDGTIRRGIALTHNKSKRYLRTQQELKYLQHQQAEIRKRQHTELANHLLSLGDCFYVEKMVWTSLTHRAKETEISEKTGKIKRKKRFGKSVANKAPATLIGILQRKSAALGIPGVIEVPTSVKASQYNHQSGTYTHKPLSQRWNNMPDGERIQRDLYSAFLLQHYDPQTNTFDANSLHQDYPQFVQYHHDAVLRLYAMPKAPSSMGIKRSLR

SEQ ID NO: 2015 - protein, 510 aa, unidentified
  REGION 1..510: note = Category: MG81 effectors
  REGION 1..510: note = Description: MG81-293 effector
  source 1..510: note = uncultivated organism sequence
MKKCSTDTCCLTLPLKLEKWQEDRLAKRFELARQIYNTMVHAELKKLKALEHSEQYQEIQEQLRVLTQKEHQDKKKLRLLYKARDELLKSWGFSEYGFKENIKYYYKHFNKNIGSSVAFHGIAPQVWTAFEKVLFGNGKKVHYKRFGEMRSLRGFSSTGKSGGVEIMFRGTYIEWKGLKLLLKLSPNNAYENEMLSYRVKYVRLIRKPGKQKDRWYAQLVLEGKPAVKYDLGTGKAIHPVGSGAVGLDIGPQTLAYSASSEADLVELADQVQNIEQIKCRLQRKMDRSRRATNPDNYKDDGTIKRGVKLTHNKSKRYCKIQRELKYLQHCQAETRKRQHIQLANHLISLGDCFYVEEMSWAALVHRSKKTEVSEKTGRFKRKKRFGKSIANKAPRSMIEILRQKCISLGVPGVIEVPTSVRASQYNHQSDEYTKKTLSQRWNLMPDGQRIQRDLYSAFLLQHYDPKTENFDSDSLQHDYPQFVIYHQQVIQRLSVIPKTPSSMGIYRSVR

SEQ ID NO: 2016 - protein, 512 aa, unidentified
  REGION 1..512: note = Category: MG81 effectors
  REGION 1..512: note = Description: MG81-294 effector
  source 1..512: note = uncultivated organism sequence
MKKSSTDTCCLTLPLKLEKWQEDRLAKRFEIARQLYNTLVHAELKRLAQVKQTAEYRENERKIRTLDWNDPGDQAKLKGLYKERRKSLKTAGFTDYSFTTDMGKYYKHFRDNIGSSVAVHGIAPQVWAAFDKLLFKKGGKKVHYKKPGEVNSVQGYSRTGKSGGTEIMFRGPYIEWKGLKLPLKLSPDNAYETDMLQRRVKLVRLVRRPGKRRDRWYAQLVLEGKPAIKADPVTGKAVHPIGSGPVGLDIGPQTLAYSAAGAAGLVELADRVQNIEQEKRCLQRKMGRSRRATNPDNYAEDGTIRRGVKLTHNKSKRYRRSQQELKYLQRRQAEIRKLQHIQLANHLLSLGDHFYVEKMEWSSLTHRAKKTVISEKTGKPRSKKRFGKSIANKAPAMLIEILRQKCKSLGLPNVVEINPADIKASQYNHLTGEYVKKSLSRRWNDMQDGEHLQRDLYSAFLLQHYDSMSKALDLDSLARDYPAFVQYHHQEIERLHALPKTPASMGIRRSIA

SEQ ID NO: 2017 - protein, 602 aa, unidentified
  REGION 1..602: note = Category: MG81 effectors
  REGION 1..602: note = Description: MG81-295 effector
  source 1..602: note = uncultivated organism sequence
MTTILRAYKTELDPTDEQRVVLARHVAGARVAHNWALEKWKELDGTRGVALGCRALAGIDAKGGEAAALFGYCLAALIRGEPVKVRTPKSEAGSRYRYRPASGVQLPDFRAGRVDWYSQLVSAKEEQPERFGWLSELSAFAIREAVLDVADGWKHFFEHLKAGRYASAGPPRFRGRQRASYHSDQPDPIRVTERAVKIPGVGWVRMKERGYLPVTEENSHRFIGGGKACGLGVSEKDGRWYVALRCEVPRPFPQKRGPGRALAMHQTKRVPGRELGVEVGVRVLAVASTGERAGHVWHSPLRDDRRIDKFEMLRKRWERRMARRWKDGVKTRDQSQGWKEAAMRVAHYHARIKSLRDDVCGKAARQIADMGAETVRMRGPGIAKMLSRAGKRGDAARTRNRLAKNVHAARMGDLRRRLEYKQAWAGGRLELVPIEEPTTNRCSACNAVRDTNAGYPTFMCPTCGYQEDRDDNSAINLLNYRAPSGDPAAGPRSAGLKPPKGDNGRRKRTARAEEKSSVTAPHGDVTSAPGPGNRVSGASHSVRPIDAYHEVPFEQSGDAHLGSRQFGLDTALFGADDPNRSQIEPQRSEFPGLLAHRAGGTS

SEQ ID NO: 2018 - protein, 525 aa, unidentified
  REGION 1..525: note = Category: MG81 effectors
  REGION 1..525: note = Description: MG81-296 effector
  source 1..525: note = uncultivated organism sequence
MTKNNNNTDTCVLTLPLRVEKWQEDCLLKRFEAARRIYNSLLNFELKKLRQLERTVEYRQIQSVISSAYRSNTKDSPECKDAFKRREKLISANGISEYGFKSDVKFFYKHFDGLIGSSVAVHCIAVQLWAAFDKYLRGSGKEIHFKRLGEISSLKGYSVKGKSGGLEIIFRGQYVEWTRKKKKLLLPLKIDPDNEYEREMLSRRVKYVRIIKKPGKNRLRWYAQLTLEGKPALKYSAETGKPIHSVGKGDVGIDIGPQTVAYASDKEVALLELADRVTNIEHQKKKLQRKLDRSRRATNPDNYKPDGTIKRGVKLTRNKSKRYLKLQSKLAYIQHRQAEIRKLQHTCLANHMLTLGDRFFVEKMNWPGLAHRAKETSISEKTGRYKRKKRFGKSLANKAPAMFISILKRKCETLGLPGVVEVDTFRLKASQYNHLSDTYEKKSLSERWNYMPISDGSDSSKTKRIQRDLYSAFLLQHTIPQPCSFDKEALREDYPNFVTMHDAEIHRLEYLPKTITSMGVRRSHS

SEQ ID NO: 2019 - protein, 527 aa, unidentified
  REGION 1..527: note = Category: MG81 effectors
  REGION 1..527: note = Description: MG81-297 effector
  source 1..527: note = uncultivated organism sequence
MAKKNNNNNTDTCVLTLPLRVEKWQEDCLLKRFEAARRIYNSLLNFELKKLRQLERTVEYRQIQSVISSAYRSNTKDSPECKDAFKRREKLISANGISENGFKSDVKFFYKHFDGLIGSNVAVHCIAVQLWAAFDKYLSGSGKEIHFKRLGDISSLKGYSVKGKSGGCEIIFRGQYVEWTRKKKKLLLPLKIDPDNEYEREMLSRRVKYVRIIKKPGKNRLRWYAQLTLEGKPALKYSAETGKPIHSVGKGNVGIDIGPQTVAYASDKEVALLELADRVTNIEHQKKKLQRKLDRSRRATNPDNYKPDGTIKCGVKLTRNKSKRYLKLQSKLAYIQHRQAEIRKLQHTCLANHMLTLGDRFFVEKMNWPGLAHRAKETSISEKTGRYKRKKRFGKSLANKAPAMFISILKRKCETLGLPGVVEVDTFRLRASQYNHLSDTYEKKSLSERWNYMPISDGSDSSKTKRIQRDLYSAFLLQHTIPQPCSFDKEALRIDYPNFVIMHDAEIHRLESLPKTITSMGVRRSHS

SEQ ID NO: 2020 - protein, 542 aa, unidentified
  REGION 1..542: note = Category: MG81 effectors
  REGION 1..542: note = Description: MG81-298 effector
  source 1..542: note = uncultivated organism sequence
MATTDKKDEDKEKLRAYKFRLDPNQAQTIALYQAAGAARYTYNMLTAYNLEVNRLRDEYWKKRHDEGISDADIKKELNALAKEDKRYKQLKYGAFGTQYLTPEKKRHEQAEHRIENGEDPSVVWNQETERSANPWLHTANRRVLVSGLQNASDAWDNFWDSRTGKRAGRLVGTPRFKKKGVSRDSFTVPAAEKMGAYGAAYLRGEPAYKQGRRKITDYRHVRLSYLGTIRTFNSTKPLVKAVAAGAKIRSYTVSRNADRWYVSFLVKFSEPIRRSATKRARAAGSVGVDLGVKYLASLSDSEAPQRFPNLKFVEGLPSLENPRWSEASSRRLHKLQRALARSQKGSNRRSRLVKQIARLHHMTALRRESNLHQLTKKLATGYTLVGFEDLNVSGMTASAKGTVENPGKNVAQKSGLNRVVLDAAFGVFRNQLEYKAVWYGSAFEKVNRYFASSQTCSECGRKAKTKLTLRDRVFDCAYCGNMMDRDFNAAVNICREAQRLFDEKLASEDGESLNGRGSRGALRGAKTVEASRPPASHRRGSP

SEQ ID NO: 2021 - protein, 514 aa, unidentified
  REGION 1..514: note = Category: MG81 effectors
  REGION 1..514: note = Description: MG81-299 effector
  source 1..514: note = uncultivated organism sequence
MGNSSTDTCCLTLPLKLEKWQEDRLAKRFELARQIYNTLVRAELKKLERVKHSAPYREIQGQIQALDWSNPNDKGALRRLYKARDALLKSSGFTEYSFKSDIKYYYKHFSDNIGSDVAFHGIAPQVWTAFEKVLFKGGKKIHYKQYGDVSSVQGYSKTRKSGGREIMFRGTYIEWKGLKLPLKLSPDNAYENEMLRYRIKFVRLVRKPGKQKDRWYAQLVLEGKPVVKREPATGEAVHPVGSGVVGLDIGPRTLAYSAPGEAGLVELADQVQNIEQAKCRLQRKLDRSRRATNPDNYSENGTIRRGVKLTRNKSKRYRKIQNQLKYLQYCQAETRKRQHTQLANHLLSLGDSFYVEDMPWPALARRAKETVVSEKTGRIKRKKRFGKSIANKAPATLTRILKQKCTSLGLPGVVEVPTSVRASQYNHQTGEYIKKPLSQRWNNMPDGQRIQRDLYSAFLLQHYDPGTGTFDSASLQRDYPQFTQYHHQVIQHLLSMPKTLSSMGIRQSIRQYEF

SEQ ID NO: 2022 - protein, 1387 aa, unidentified
  REGION 1..1387: note = Category: MG81 effectors
  REGION 1..1387: note = Description: MG81-300 effector
  source 1..1387: note = uncultivated organism sequence
MKLTKVEKARIAVSREKKDSGRIILYTNPEDVKKTSVTTMEQQVSKRIDQANKLYQVFFKSVIPVELNKHFAEISKIAAKCRNTEEFYKKACGYSGYEWTDAKQKKRTSQISRFSYTSSGKNMYVVMDNFVKEYMVQIWQEKDFRNAAVKILCCICDGKKFASKLEKVKKESPDTLKKFIEISGKCEGNPFVDYDTSFLEKVFTLVISQMVKNCDRKSYEQDDKEKIKKSIQKEIQWLSHVQSVTERSFGREGKTYLLFKIRNPYATEERLQTVLIRMRKTLKRGRNRDIAIVLLQGLAQMNQVTFTDTVKHLYQEEEKAFCDFIDAVNRDYYRVNIVKSVRNMDVKVQPDLNDNSILKLSGLGNIKKEALSDTLLRYAASADESDQVLLDIKKLLFEYFLPGNSKETSKYTTVQNLWNIPYLPKIFFDYGFENEDSDDDNECAEDIETLCDVEPQYKINQHSLKRRIRYVNYGKYLQMTKNESDRERRYWIHYIKEFVEKNYVDSGRTLSEKNCYASSMMLNCWKEIIRYLCGKYIDIGKAVFHFTNLTAMPKPKDKIIYGQLEEQYKKGISSFDYEAIKAEETLQRDIVQSVVAAAFAFSKSVIDETKMEECQETNKEDILFLSENVLGSLLKENTIKLILRFYGGESSVAQKEYFDQQEIVQEMISHLKSIRNENFHYLDGAKKDNPHKYASILWKNDEMAYQKLTKQRYYANNVGLFYRAEEIQELVQELYSQKNITEAQIPAFRTVLKRKDLPGYMEELGILFPDNTQEKSKGDFEGTLYFLMKEIYYRDFIVKDKAAAYFFKAVDQNKEQSKKEDKHTERAAENFHRYVKSLEKKYNKKEISFGTVCQYIMMEYNQQNTTKQETEIYKHFKMLISLCIRKAFGNYIKETYRFLFHPIYSKQQGEPEYLDTLELESGVKEKNYEWFTLAHFLHPVQLNHLVGDLKSYIQYREDILRRIVFAEQRVYADQQKEVQQKVKTAKEILEVLEFVREVSGRVSNEYTDYYENEEEYAEFLYQYIDFRKREGKSAFESLKYFCQNILDSGTVVDLYADTENPKVLRNIELTRMYAGSNVKIPEYEKITEDEIKMYYQEKNSVALILSRGLCRNEKEQKKVIEFNWKKKRLTLNEITDVFSLVNDLLGKMISFSYLRERDQMYLLLGFYYMALCAENKSENHLGWKGETLDKLESSDSKFDIGGGLVLYQIVSAFNFGSKLLYISEDGRWKMAGGAFPGKYGRFENDYNHRTSLSKVIRLFENESYEREIIYWRDYVDHMKYYVNQNQSIMEIYSAFYSKVLGYSAKLRKSVVFNLQAALEKHHINPECIWMTSDGKCADIKLMKNLESQKFTYKLAKREGEKTERKICMNALNENFLKTIRTSLEYKK

SEQ ID NO: 2023 - protein, 538 aa, unidentified
  REGION 1..538: note = Category: MG81 effectors
  REGION 1..538: note = Description: MG81-301 effector
  source 1..538: note = uncultivated organism sequence
MDNEEKKEDGATCCLTLPLKLEKWQSDHLEKRFEIARQLYNTLVHAELKKKCQVERMPEYQEIMKMIDTASNQKEKWALEKKRKAFLEENGFSRNAFKADMEKYYKHFNDNIGANVALHGITAQVWIAFDKVFVDNYKQKGKVHFKKPGELCSVQGYSQKKSGGKEIMFREDRIIWNQQGNRDRKKVKREFLLKLSPNNPYEAEMLKRHVKFVRILRKDGKTKPHWYAQLVLEGKPAVKRDPISSAPKHPVGHGVVGIDIGTRTLAYSTDKEVNLLELADRVQNIEQEKRRLQRKMDRSRRAMNPENYNPDGTFKRGVKLTRNKSKRYRRIQHQLAMIQHHQADIRKQQHNELANYLLTLGDCFFVENMSYCDLVHRANKTEISEKTGRYKRKKRFGKSIANKAPAMLITMLKQKCQSRGLEGVKEVDTHVRASQYNHQTDTCIEKALENRWNVMPDGERIQRDLYSAFLLQHCKQGLPEYNRKELKKEFGEELYRVFDREALQRDYPQFVAYHHMTIQRLSELPHTIPSMGIRRIIS

SEQ ID NO: 2024 - protein, 511 aa, unidentified
  REGION 1..511: note = Category: MG81 effectors
  REGION 1..511: note = Description: MG81-302 effector
  source 1..511: note = uncultivated organism sequence
MAKCSTDTCCLTLPLRLEKWQEDRLAKRFEIARQIYNTMVRAELKKLRAIEQSEPYKANQEKIQALDWKTQADKRALKALYKERDKLLRAGGFSERGFKSDIKNYYMHFNNNIGSNVAAHGIAPQVWAAFEKMLFKKEGKKVHFKKKGDIHSLRGYSVTRKSGGVEIIFRETYIEWKGLKLPLKLSPDNIYETQMLSYRVKYVRLLRKSGKRKDRWYAQLSLEGKPVIKYNPKTGEVRHPIGKGAVGLDIGPQTLAYSAATGADLVELANQVQNVEQEKRRLQRKLDRSRRATNPGNYADDGTIRRGIALTHNKSKRYLRTQQELKYLQHQQAEIRKRQHTELANHLLSLGDRFYVEKMAWTSLTHRAKETEISEKTGKIKRKKRFGKSVANKAPATLIGILQRKSAALGIPGVIEVPTSVKASQYNHQSGTYTPKPLSQRWNNMPDGKRIQRDLYSAFLLQHYDPQTNTFDANSLHQDYPQFVQYHHDAVLRLYAMPKTPSSMGIKRSLR

SEQ ID NO: 2025 - protein, 512 aa, unidentified
  REGION 1..512: note = Category: MG81 effectors
  REGION 1..512: note = Description: MG81-303 effector
  source 1..512: note = uncultivated organism sequence
MKKSSTDTCCLTLPLKLEKWQEDRLAKRFEIARQLYNTLVHAELKRLAQVKQTAEYRENERKIRTLDWNDPGDQAKPKGLYKERRKSLKTAGFTDYSFTTDMGKYYKHFRDNIGSSVAVHGIAPQVWAAFDKVLFKKGGKKVHYKRPGEVNSVQGYSRTGKSGGREIMFRGAYIEWKGLKLPLKLSPDNAYETDMLQRRLKLVRLVRRPGKRRDRWYAQLVLEGKPAIKADPVTGKAVHPIGSGPIGLDIGPQTLAYSAAGVAGLVELADRVQNIEQEKRCLQRKMDRSRRATNPDNYAEDGTIRRGVKLTHNKSKRYRRSQQELKYLQHRQAEIRKLQHIQLANHLLSLGDHFYVEKMEWSSLTHRAKETVISEKTGKPRSKRRFGKSIANKAPAMLIEILRQKCKSLGLSDVVEINPADIKASQYNHLTGEYVKKSLSRRWNDMQDGEHLQRDLYSAFLLQHYDSCSKTLDHDSIVRDYPAFVQYHHREIERLHALPKTPSSMGIRRSIA

SEQ ID NO: 2026 - protein, 534 aa, unidentified
  REGION 1..534: note = Category: MG81 effectors
  REGION 1..534: note = Description: MG81-304 effector
  source 1..534: note = uncultivated organism sequence
MGWKSKGRGGTLVKKSSTDTCCLTLPLKLEKWQSDRLEKRFEIGRQIYNTVVRAELKKLQQVERTPQYREIEQKLKEAKQEEAKELWKTRTQLLSKSGFSEYGFKSDMKYYYQHFKENIGSSVAVHGIASQVWTAFEKVLFSKDGKMVHFKKKGELSSLRGYSQAGKSGGIEIIFRGSYVEWKGLKLPLKLSPDNDYETEMLSKRVKYVRILRKEGKTKPHWYAQLVLEGKPAIKRDPASGAPKHPVGHGVVGIDIGTRTLAYSADSKVDLIELADRVQNIEQEKMLLQRKLDRSRRATNPENYKPDGTIKKGVKLTRNKSKRYRKIQHQLAMLQHRQADIRKRQHNELANYLLTLGDCFFVEDMDYRALTRKAKKTEISENTGRYKRKKRFGKSIANKAPSMLIALLDQKCKSLNLEGVKKVDTAVKASQYNHQTDECKAKELKERWNIMPDGERIQRDLYSAFLLQHCRRDLPEYNRKKLQETFGNELYRVFDREALQRDYPKFVEYHRETIQRLSALPKTIASMGIRRSIS

SEQ ID NO: 2027 - protein, 511 aa, unidentified
  REGION 1..511: note = Category: MG81 effectors
  REGION 1..511: note = Description: MG81-305 effector
  source 1..511: note = uncultivated organism sequence
MGKSKTETCCLTLPLKLEKWQEDRLAKRFEIARQIYNTLVHAKLKKLNQIERSSEYQTIQDQITNLDRNDPERIKELPSLYKKRTKLLRDAGFTEYGFKSDVKHYYKYFHKNIGSSVAVHGIAPQVWAAFEKKLFKKQGKIVHYKRKGTLRSVKGGSATGKSGGTEIIFRGTYIQWKDLNLPLKRSPDNAYESEMLGYRVKYVRILRKPGKSKNRWYAQLVLEGKPVIKRNPMTGAALHPVGHGAVGLDIGPQTLAYSAADGVGLLELADQVQNIERQKALLQRKLDQSRRASNPDNYNEDGTIKRGVKLTRNQSKRYCKTQRDLAYLQHCQAETRKRQHIALANHLLTLGDRFYVEQMSWVALARRSKKTEVSEKTGKIKRKKRFGKSIANKAPAMLIEILRQKCISLGLPGVVDVPTSIKASQYNHQSKDYIKKNLSERWNDMPDGEKIQRDLYSAFLLQHCTPELNAFDQESLQQDYPQFVQYHHQVMQQLSEMPKTPSSMGIRRRTS

SEQ ID NO: 2028 - protein, 538 aa, unidentified
  REGION 1..538: note = Category: MG81 effectors
  REGION 1..538: note = Description: MG81-306 effector
  source 1..538: note = uncultivated organism sequence
MNNEEKEKEGATCCLTLPLKLEKWQSDHLEKRFEIARQLYNTLVHAELKKKCQVERMPEYQEIMKMIDTASNQKEKWALEKKRKAFLEENGFSRNAFKADMEKYYKHFNDNIGANVALHGITAQVWIAFDKVFVDNYKQKGKVHFKKPGELCSVQGYSQKKSGGKEIMFREDRIIWNQQGNRDRKKVKREFLLKLSPNNPYEAEMLKRHVKFVRILRKDGKTKPHWYAQLVLEGKPAVKRDPISSAPKHPVGHGVVGIDIGTRTLAYSTDKEVNLLELADHVQNIEQEKRRLQRKMDRSRRATNPENYNPDGTFKRGVKLTRNKSKRYRRIQHQLAMIQHHQADIRKQQHNELANYLLTLGDCFFVENMSYCDLVHRANKTEISEKTGRYKRKKRFGKSIANKAPAMLITMLKQKCQSRGRKGVKEVDTHVRASQYNHQTDTCIEKALENRWNVMPDGERIQRDLYSAFLLQHCKQGLPEYNRKELKKEFGEELYRVFDREALQRDYPQFVAYHHMTIQRLSELPHTIPSMGIRRIIS

SEQ ID NO: 2029 - protein, 522 aa, unidentified
  REGION 1..522: note = Category: MG81 effectors
  REGION 1..522: note = Description: MG81-307 effector
  source 1..522: note = uncultivated organism sequence
MKRSSTDTCCLTLPLKLEKWQSDRLEKRFEIGRQIYNTIVHAELKKLRKLERTQQYQEIEQKLENAKQEETKELWKKKRQLLDQNGLSEDHFKADMKYYYPHFKDNIASNVAVHGIASQAWTAFEKVLFSKDGKMVHFKKKGELSSLRGYSRAGKSGGVEIIFRGSYVEWKGLKLPLKLSPDNDYETEMLSKRVKYVRILRKDGKTKTHWYAQLALEGKPAVKRDSISGVPKHPVGHGVVGIDIGTRTLAYSTDSEVNLLELADRVQNIEQEKRRLQRKMDRSRRAMNPGNYKPDGSIKQGVKLTWNNSKRYKRIQHQYAMIQHHQADIRKQQHNELANYLLTLGDCFFVENMSYCDLAHRANKTEISEKTGRYKRKKRFGKSIANKAPAMLITMLKQKCQSRGLEGVKEVDTHVCASQYNHQTDTCIKKALENRWNVMPDGERIQRDLYSAFLLQHCRRDLPEYNRKELQKEFGEELYRVFDREALQRDYPRFVAYHHMTIQRLSELPHTIPSMGIRRIIS

SEQ ID NO: 2030 - protein, 550 aa, unidentified
  REGION 1..550: note = Category: MG81 effectors
  REGION 1..550: note = Description: MG81-308 effector
  source 1..550: note = uncultivated organism sequence
MGRKSTGRGGTRVNNEEKEKDGATCCLTLPLKLEKWQSDHLEKRFEIARQLYNTLVHAELKKKCQVVRMPEYQEIMKMIDAASNQKEKWALEKKRKAFLGENGFSRNAFKADMEKYYKHFNDNIGANVALHGITAQVWIAFDKVFVDNYKQKGKVHFKKPGELCSVQGYSQKKSGGKEIMFREDRIIWNQQGNRDRKKVKREFLLKLSPDNPYEAEMLKRHVKFVRILRKDGKTKPHWYAQLVLEGKPAVKRDPISSAPKHPVGHGVVGIDIGTRTLAYSTDKEVNLLELADRVQNIEQEKRRLQRKMDRSRRAMNPENYNSDGTFKRGVKLTRNKSKRYRRIQHQLAMIQHHQADIRKQQHNELANYLLTLGDCFFVENMSYCDLVHRANKTEISEKTGRYKRKKRFGKSIANKAPAMLITMLKQKCQSRGLKGVKEVDTHVRASQYNHQTDTCIEKALENRWNVMPDGERIQRDLYSAFLLQHCKQGLPEYNRKELKKEFGEELYRVFDREALQRDYPQFVAYHHMTIQRLSELPHTIPSMGIRRIIS

SEQ ID NO: 2031 - protein, 485 aa, unidentified
  REGION 1..485: note = Category: MG81 effectors
  REGION 1..485: note = Description: MG81-309 effector
  source 1..485: note = uncultivated organism sequence
MDNEEKEKDGATCCLTLPLKLEKWQSDHLEKRFEIARQLYNTLVHAELKKKCQVVRMPEYQEIMKMIDAASNQKEKWALEKKRKAFLEENGFSRNAFKADMEKYYKHFNDNIGANVALHGITAQVWIAFDKVFVDNYKQKGKVHFKKPGELCSVQGYSQKKSGGKEIMFREDRIIWNQQGNRDRKKVKREFLLKLSPDNPYEAEMLKRHVKFVRILRKDGKTKPHWYAQLVLEGKPAVKRDPASGAPKHPIGHGVVGIDIGTRTLAYSTDKEVNLLELADHVQNIEQEKRRLQRKMDRSRRATNPENYNPDGTFKRGVKLTRNKSKRYRRIQHQLAMIQHHQADIRKQQHNELANYLLTLGDCFFVENMSYCDLVHRANKTEISEKTGRYKRKKRFGKSIANKAPAMLITMLKQKCQSRGLKGVKEVDTHVRASQYNHQTDTCIEKALENRWNVMPDGERIQRDLYSAFLLQHCKQGLRNIIGRN

SEQ ID NO: 2032 - protein, 511 aa, unidentified
  REGION 1..511: note = Category: MG81 effectors
  REGION 1..511: note = Description: MG81-310 effector
  source 1..511: note = uncultivated organism sequence
MGKSSTDTCCLTLPLKLEKWQEDRLAKRFEIARQIYNTMVRAELKRLRQVEQSPQYRSNKKAIQALDWKNTADKPKLKTLYRERDKLLKGGGFTEYGFKSDIKNFYKHFAENIGSSVAVHGIAPQVWAAFERVLFKKEGKKVHFKKTGGIRSLRGYSVTGKSGGVEIIFRGSYIEWKGLNLPLKLSPDNAYETEMLSYRVKYVRILRKPGKTRDRWYAQLSLEGKPAIKRNPASGNPVHPVGQGAVGLDIGPQTLAYAAEKEANLVELADRVQNIEREKHLLQRKMDRSRRAANPDNYAENGTIRRGVKLTHNKSKRYLRLQRELCYLQHCQAETRKRQHTELANHLLSLGSCFYVEDMAWPSLTHRAKKTEISDKTGRIKRKKRFGKSIANKAPAALINILRTKCVSLGIPGVVEVPTSLKASQYNHQSKEYTPKPLSQRWNDMPDGSQIQRDLYSAFLLQHYDPQSGNFDQASLEADYPQFVQLHNQSIQRLLTVPKAPSSMGIRRSVS

SEQ ID NO: 2033 - protein, 512 aa, unidentified
  REGION 1..512: note = Category: MG81 effectors
  REGION 1..512: note = Description: MG81-311 effector
  source 1..512: note = uncultivated organism sequence
MKKSSTDTCCLTLPLKLEKWQEDRLAKRFEIARQLYNTLVHAELKRLVQIKRTAEYLENEQKIRALDRNNPADRAKLQELYKEQRKSLKTAGFTDYSFTTDMGKYYKHFRDNIGSSVAVHGIAPQVWAAFDKVLFKKGGKKVHYKKPGEVNSVQGYSRTGKSGGTEIMFRGPYIEWKGLKLPLKLSPDNAYETDMLQRRVKLVRLVRRPGKRRDRWYAQLVLEGKPAIKADPVTGKAVHPIGSGPVGLDIGPQTLAYSAAGAAGLVELADRVQNIEQEKHCLQRKMDRSRRATNPDNYAEDGTIRRGVKLTHNKSKRYRRSQQELKYLQRRQAEIRKLQHIQLANHLLSLGDHFYVEKMEWSSLTHRAKKTVISEKTGKPRSKKRFGKSIANKAPAMLIEILRQKCKSLGLPNVVEINPADIKASQYNHLTGEYVKKSLSRRWNEMQDGEHLQRDLYSAFLLQHYDSMSKALDLDSLARDYPAFVQYHHREIERLHALPKTPASMGIRRSIA

SEQ ID NO: 2034 - protein, 534 aa, unidentified
  REGION 1..534: note = Category: MG81 effectors
  REGION 1..534: note = Description: MG81-312 effector
  source 1..534: note = uncultivated organism sequence
MGWKSKGRGGTLVKKSSTDTCCLTLPLKLEKWQSDRLEKRFEIGRQIYNTVVRAELKKLQQVERTPQYREIEQKLKEAKQEEAKELWKTRTQLLSKSGFSEYGFKSDMKYYYQHFKENIGSSVAVHGIASQAWTAFEKVLLSKDGKMVHFKKKRELSSLRGYSQAGKSGGIEIIFRGSYVEWKGLKLPLQLSPNNEYETEMLSKRVKYVRILRKDGKTKTHWYAQLALEGKPAVKRDSISGAPKHPVGHGVVGIDIGTRTLAYSTDSEVNLLELADRVQNIEQEKRRLQRKMDRSRRAMNPGNYKPDGSIKQGVKLTWNNSKRYKRIQHQYAMIQHHQADIRKQQHNELANYLLTLGDCFFVEDMDYRALTRKAKKTEISEKTGRYKRKKRFGKSIANKAPSMLIALLDQKCKSLNLEGVKKVDTAVKASQYNHQTDECKAKELKERWNIMPDGERIQRDLYSAFLLQHCRRDLPEYNRKKLQEAFGNELYRVFDREALQRDYPKFVEYHRKTIQRLSALPKTIASMGIRRIIS

SEQ ID NO: 2035 - protein, 512 aa, unidentified
  REGION 1..512: note = Category: MG81 effectors
  REGION 1..512: note = Description: MG81-313 effector
  source 1..512: note = uncultivated organism sequence
MPAKQKEDSNRCVLTLPLLTEPWQEHIIEKRFKIIEHLKNQLISIELRKLKNLQRTKAYKNLMKRIESVPKSERTALYKERNKMLKDAGFSQYTFMDDMAGKKSLMQKHFESHINVQIAHKAAIDVWSSFEKFLFGSGQMIHYQKRGTLSSVASKSPKTGMFYYSDENIFKWSGGGTKPKGGIILCLRVAPVKTNYEKEMVANNEIKYYRVVRKWMKTKYKYYLQITFAGKPADKHHEVSTDRVGIDIGTQTIAIASDKSVKLLELADKVNKNHIKKCELQRKLDRSRRYTNPDNFNPDGTVKRGTKGHKLKWNKSKHYIEIAGKIRELERKNADIRKYQHTCLANDILAMGNQIYIEPMNYKGLQKRAKETQVDEKGRYKKKKRFGKSLANKAPAMFVTILKTKAEQHGGEVYEVDIMSYRASQCDHTTGEYTKHGLNDRWRILGNGDKVQRDLYSAFLIKNSNKTHDEIDLDKCSKTYDNFKKLHDKEIENIRNEVILRKRRNISSYGIA

SEQ ID NO: 2036 - protein, 385 aa, unidentified
  REGION 1..385: note = Category: MG81 effectors
  REGION 1..385: note = Description: MG81-314 effector
  source 1..385: note = uncultivated organism sequence
MKTLKLRILDKHVPKLGQVASACNYVWNYVNALGFTHLQRTGKFFGAYDIALYTKGAGELLGLHSQTIQAITETYVKSRKQFCKAKLKWRTNRHDSKHKALGWIPFKKSAVKVLPSRQTGRKKRKTGIVLSLAKGCKLHIEVWDSYNLDLYQANTCELVQDSRGRWYACITVKDFPKTKCGTNKVGIDLGLKTAATTSNGDQLITKVTQAYAKALGTAQRAGNKARVKAINAKIRHTRQDLIHKFTTNLVKDSAVIVVGDVKSTAIIQPRKRDKPTNQQTTPRPHRKRMKLAKSVYDAGWFELKRQLEYKCKHAGCQLEIVSERMTTQTCSCCGNTTGSPKGRTGLGIREWTCGTCHTTHDRDINAARNILAVGLHRLDVGIPSL

SEQ ID NO: 2037 - protein, 532 aa, unidentified
  REGION 1..532: note = Category: MG81 effectors
  REGION 1..532: note = Description: MG81-315 effector
  source 1..532: note = uncultivated organism sequence
MILLANNNNNNNNNTDTCVLTLPLRVEKWQEDCLLKRFEAARRIYNSLLNFELKKLRQLERTVEYRQIQSVISSAYRSNTKDSLECKDAFKRREKLISANGISENGFKSDVKFFYKHFDGLIGSSVAVHCIAVQLWAAFDKYLSGSGKEIHFKRLGDISSLKGYSVKGKSGGCEIIFRGQYVEWTRKKKKLLLPLKIDPDNEYEREMLSRRVKYVRIIKKPGKNRLRWYAQLTLEGKPALKYSAGTGKPIHSVGKGNVGIDIGPQTVAYASDKEVALLELADRVTNIEHQKKKLQRKLDRSRRATNPDNYKPDGTIKRGVKLTRNKSKRYLKLQSKLAYIQHRQAEIRKLQHTCLANHMLTLGDRFFVEKMNWPGLAHRAKETSISEKTGRYKRKKRFGKSLANKAPAMFISILKRKCETLGLPGVVEVDTYSLKASQYNHLSDTYEKKSLSERWNYMPISDGSDSSKTKRIQRDLYSAFLLQHTIPQPCSFDKEALRIDYPNFVTMHDAEIHRLESLPKTVTSMGVRRSHS

SEQ ID NO: 2038 - protein, 511 aa, unidentified
  REGION 1..511: note = Category: MG81 effectors
  REGION 1..511: note = Description: MG81-316 effector
  source 1..511: note = uncultivated organism sequence
MKKSNTDTCCLTLPLKLEKWQEDRLAKRFEIARQIYNTMVHAELKKLRNIENSQPYRQIQKQIEALNWKNQNDKARLKSLYNDRNKLLNTIGFSEYGFKADIKYYYKHFNDNIGSSVAVHGIAPQVWAAFEKMLFHKEGKKVHYKKKDDIHSLHGYSVTGKSGGVEIIFRKTYIEWKGLKLPLKRSPDNAYETEMLGRRVKYVRLLRKPGKRKDCWYAQLSLEGKPAIKRDPESGERRHSIGWGAVGLDIGPQTLAYSACGAADLVELADQVQNIEQMKRRLQRKLDRSRRATNPDNYADNGTIRRGVKLTHNKSNRYRRTQRELRYLQHCQAEIRKRQHIELANHLLALGDCFYVEDMAWPSLTHRAKETAISEKTGRIKRKKRFGKSVANKAPATLIGILEQKCNSLGLPGVMKVPTSLRASQYNHQSGEYTSKPLSQRWNNMPDGERIQRDLYSAFLLQHYDPKAGNFDSALLQQDYPQFVQYHHRAIQRLSTVPKTLSSMGIQRSLR

SEQ ID NO: 2039 - protein, 398 aa, unidentified
  REGION 1..398: note = Category: MG81 effectors
  REGION 1..398: note = Description: MG81-317 effector
  source 1..398: note = uncultivated organism sequence
MKTLKLKVRKEAYNWLNAAAKETNTVWNWTKETRLKALNFNYDCNHEFHYNEETGRYQRKILSRGTWLSNEDKWAPKTSIWLSHYDLTKLTKGATKDDLFKHLPMQSINLVVKEYVRKSIQFKKSELRWRKSMGSKRNLGWIPFQAQGLSRCKNKKYIKFAGKTFRVFEHNRLNEGKWCDGCFSEDSVGDWWLCIPIKTTQSENKIAPGEAVGIDLGIRKVATTSKPSNSLATIRSYRDTEDKIKEAQRRGHKRQAKRLHRKAANQRKDILHKYSTKLVDGYQEIYIGDLNSKFLSGSKLAKSASDNAIGMLKDMVQYKGERAGRTVKIVNERYTTQDCSVCGSRSGPKGQLDIREWTCTECGTTHDRDVNAAKNILKLGKLTFVRDNSATTTPCCKK

SEQ ID NO: 2040 - protein, 538 aa, unidentified
  REGION 1..538: note = Category: MG81 effectors
  REGION 1..538: note = Description: MG81-318 effector
  source 1..538: note = uncultivated organism sequence
MDNEEKKEDGATCCLTLPLKLEKWQSDHLEKRFEIARQLYNTLVHAELKKKCQVERMPEYQEIMKMIDTASNQKEKWALEKKRKAFLEENGFSRNAFKADMEKYYKHFNDNIGANVALHGITAQVWIAFDKVFVDNYKQKGKVHFKKPGELCSVQGYSQKKSGGKEIMFREDRIIWNQQGNRDRKKVKREFLLKLSPDNPYEAEMLKRHVKFVRILRKDGKTKPHWYAQLVLEGKPAVKRDPASGAPKHPIGHGVVGIDIGTRTLAYSTDKEVNLLELADRVQNIEQEKRRLQRKMDRSRRAMNPENYNSDGTFKRGVKLTRNKSKRYRRIQHQLAMIQHHQADIRKQQHNELANYLLTLGDCFFVENMSYCDLVHRANKTEISEKTGRYKRKKRFGKSIANKAPAMLITMLKQKCQSRGLEGVKEVDTHVRASQYNHQTDTCIEKALENRWNVMPDGERIQRDLYSAFLLQHCKQGLPEYNRKELKKEFGEELYRVFDREALQRDYPQFVAYHHMTIQRLSELPHTIASMGIRRSIS

SEQ ID NO: 2041 - protein, 354 aa, unidentified
  REGION 1..354: note = Category: MG81 effectors
  REGION 1..354: note = Description: MG81-319 effector
  source 1..354: note = uncultivated organism sequence
MKTLKIRIKDSNQTKLLCQLASEVNLVWNYCNELGFKYLQRTGKFLSAYDIDKYTAGASKECGLHSQTIQAISNEYVTRRKQFKKSKLSWRVSNPKSAKCSLGWIPFKKSAIKYGKGFIQYGKNIFKLWDSYNLSQFDIYTGSFVQDSRGRWYVCVTVDTPKQLPNQATKAIGIDLGLKDLATCSDGTKISNPKYYSHYQAKLGKSQRANKKRLVQTLHAKIKNSRKDYLQKQSTQLVKDNGLIIVGSLSANKLTKTKMAKSVNDTGFSAFKTMLKYKCENAGVWFVEVSENYTTQICSCCGEISANSPKGRINLGIREWTCSLCNATHDRDVNASKNILRLGHQTLAGGIPSL

SEQ ID NO: 2042 - protein, 511 aa, unidentified
  REGION 1..511: note = Category: MG81 effectors
  REGION 1..511: note = Description: MG81-320 effector
  source 1..511: note = uncultivated organism sequence
MKKSNTDTCCLTLPLKLEKWQEDRLAKRFEIARKIYNTMVHAELKKLRNIENSQPYRQIQKQIEALNWKNQNDKARLKTLYNDRNKLLNTIGFSEYGFKADIKYYYKHFNDNIGSSVAVHGIAPQVWAAFEKMLFHKEGKKVHYKKKDDIHSLHGYSVTGKSGGVEIIFRKTYIEWKGLKLPLKRSPDNAYETEMLGRRVKYVRLLRKPGKRKDCWYAQLSLEGKPAIKRDPESGKRRHSIGRGAVGLDIGPQTLAYSACGAADLVELADQVQNIEQMKRRLQRKLDRSRRATNPDNYADNGTIRRGVKLTHNKSNRYRRTQRELRYLQHCQAEIRKRQHIELANHLLALGDCFYVEDMAWPSLTHRAKETAISEKTGKIKRKKRFGKSVANKAPATLIGILEQKCNSLGLPGVIKVPTSLRASQYNHQSGEYTSKPLSQRWNNMPDGERIQRDLYSAFLLQHYDPQAGNFDSALLQQDYPQFVQYHHRAIQRLSTVPKTLSSMGIQRSLR

SEQ ID NO: 2043 - protein, 341 aa, unidentified
  REGION 1..341: note = Category: MG81 effectors
  REGION 1..341: note = Description: MG81-321 effector
  source 1..341: note = uncultivated organism sequence
MLPLKIDPDNEYEREMLSRRVKYVRIIKKPGKNRLRWYAQLTLEGKPALKYSAGTGKPIHSVGKGNVGIDIGPQTVAYASDKEVALLELADRVTNIEHQKKKLQRKLDRSRRATNPDNYKPDGTIKRGVKLTRNKSKRYLKLQSKLAYIQHRQAEIRKLQHTCLANHMLTLGDRFFVEKMNWPGLAHRAKETSISEKTGRYKRKKRFGKSLANKAPAMFISILKRKCETLGLPGVVEVDTFRLKASQYNHLSDTYEKKSLSERWNYMPISDGSDSSKTKRIQRDLYSAFLLQHTIPQPCSFDKEALRIDYPNFVTMHDAEIHRLESLPKTITSMGVRRSHS

SEQ ID NO: 2044 - protein, 511 aa, unidentified
  REGION 1..511: note = Category: MG81 effectors
  REGION 1..511: note = Description: MG81-322 effector
  source 1..511: note = uncultivated organism sequence
MGKSSTDTCCLTLPLKLEKWQEDRLAKRFEIARQIYNTMVRAELKKLDRVKQLPEYRKNQKEIQALDWKNSADKQRLKELYGNQRKILQKQGFTEYGFKADSKDYYKHFIENIGSSVATHGIAPQVWNAFDKMLFQKDGKVVHFKRYGDVHSLKGGSVAHKSGGAEIMFRKTYIEWKGLKLPLKLSPDNAYEAEMLSYHVKYVRILRTRGKTKDRWYAQLSLEGKPAVKYDSNTGKPVHPVGKGAVGLDIGPQTLAYVAANEANLVELADQVQNIEQEKRRLQRKLDRSRRATNPDNYNENGTIRRGVKLTHNKSKRYCKLQKELSWIQHCQAETRKRQHIALANHLLSLGDCFYVEPMAWPSLTHRAKKTEVSEKTGRIKRKKRFGKSVANKAPASLIGILKLKCISLGLTGVVEVPKLLKASQYNHQSKDYAPKSLSQRWNDMPDGNRIQRDLYSAFLLQHYNSQLENFNQETLERDYPQFVRLHNQTIQRLSALPKTPSSMGIRRSVS

SEQ ID NO: 2045 - protein, 533 aa, unidentified
  REGION 1..533: note = Category: MG81 effectors
  REGION 1..533: note = Description: MG81-323 effector
  source 1..533: note = uncultivated organism sequence
MILLANNNNNNNNNNTDTCVLTLPLRVEKWQEDCLLKRFEAARRIYNSLLNFELKKLRQLERTVEYRQIQSVISSAYRSNTKDSLECKDAFKRRKKLTDENGISEYGFKSDVKFFYKHFDGLIGSNVAVHCIAVQLWVAFDKYLSGSGKEIHFKRLGDISSLKGYSVKGKSGGCEIIFRGQYVEWTRKKKKLLLPLKIDPDNEYEREMLSRRVKYVRIIKKPGKNRLRWYAQLTLEGKPALKYSAGTGKPIHSVGKGNVGIDIGPQTVAYASDKEVALLELADRVTNIEHQKKKLQRKLDRSRRATNPDNYKPDGTIKRGVKLTRNKSKRYLKLQSKLAYIQHRQAEIRKLQHTCLANHMLTLGDRFFVEKMNWPGLAHRAKETSISEKTGRYKRKKRFGKSLANKAPAMFISILKRKCETLGLPGVVEVDTYSLKASQYNHLSDTYEKKSLSERWNYMPISDGSDSSKTKRIQRDLYSAFLLQHTIPQPCSFDKEALRIDYPNFVTMHDAEIHRLESLPKTVTSMGVRRSHS

SEQ ID NO: 2046 - protein, 536 aa, unidentified
  REGION 1..536: note = Category: MG81 effectors
  REGION 1..536: note = Description: MG81-324 effector
  source 1..536: note = uncultivated organism sequence
MILLANNNNNNNNNNNNNTDTCVLTLPLRVEKWQEDCLLKRFEAARRIYNSLLNFELKKLRQLERTVEYRQIQSVISSAYRSNTKDSPECKDAFKRRKKLTDENGISEYGFKSDVKFFYKHFDGLIGSSVAVHCIAVQLWAAFDKYLRGSGKEIHFKRLGDISSLKGYSVKGKSGGCEIIFRGQYVEWTRKKKKLLLPLKIDPDNEYEREMLSRRVKYVRIIKKPGKNRLRWYAQLTLEGKPALKYSAETGKPIHSVGKGNVGIDIGPQTVAYASDKEVALLELADRVTNIEHQKKKLQRKLDRSRRATNPDNYKPDGTIKRGVKLTRNKSKRYLKLQSKLAYIQHRQAEIRKLQHTCLANHMLTLGDRFFVEKMNWPGLAHRAKETSISEKTGRYKRKKRFGKSLANKAPAMFISILKRKCETLGLLGVVEVDTFRLRASQYNHLSDTYEKKSLSERWNYMPISDGSDSSKTKRIQRDLYSAFLLQHTIPQPCSFDKEALRIDYPNFVTMHDAEIHRLESLPKTVTSMGVRRSHS

SEQ ID NO: 2047 - protein, 528 aa, unidentified
  REGION 1..528: note = Category: MG81 effectors
  REGION 1..528: note = Description: MG81-325 effector
  source 1..528: note = uncultivated organism sequence
MILLAKNNNNTDTCVLTLPLRVEKWQEDCLLKRFEAARRIYNSLLNFELKKLRQLERTVEYRQIQSVISSAYRSNTKDSPECKDAFKRREKLISANGISKSGFKSDVKFFYKHFDGLIGSNVAVHCIAVQLWAAFDKYLSGSGKEIHFKRLGDISSLKGYSVKGKSGGREIIFRGQYIEWTRKKKKLLLPLKIDPDNEYEREMLSRRVKYVRIIKKPGKNRLRWYAQLTLEGKPALKYSAETGKPIHSVGKGDVGIDIGPQTVAYASDKEVALLELADRVTNIEHQKKKLQRKLDRSRRATNPDNYKPDGTIKRGVKLTRNKSKRYLKLQSKLAYIQHRQAEIRKLQHTCLANHMLTLGDRFFVEKMNWPGLAHRAKETSISEKTGRYKRKKRFGKSLANKAPAMFISILKRKCETLGLPGVVEVDTFRLRASQYNHLSDTYEKKSLSERWNYMPISDGSDSSKTKRIQRDLYSAFLLQHTIPQPCSFDKEALRIDYPNFVTMHDAEIHRLESLPKTVTSMGVRRSHS

SEQ ID NO: 2048 - protein, 534 aa, unidentified
  REGION 1..534: note = Category: MG81 effectors
  REGION 1..534: note = Description: MG81-326 effector
  source 1..534: note = uncultivated organism sequence
MILLANNNNNNNNNNNTDTCVLTLPLRVEKWQEDCLLKRFEAARRIYNSLLNFELKKLRQLERTVEYRQIQSVISSAYRSNTKDSLECKDAFKRREKLISANGISENGFKSDVKFFYKHFDGLIGSSVAVHCIAVQLWAAFDKYLSGSGKEIHFKRLGDISSLKGYSVKGKSGGLEIIFRGQYVEWTRKKKKLLLPLKIDPDNEYEREMLSRRVKYVRIIKKPGKNRLRWYAQLTLEGKPALKYSAETGKPIHSVGKGDVGIDIGPQTVAYASDKEVALLELADRVTNIEHQKKKLQRKLDRSRRATNPDNYKPDGTIKRGVKLTRNKSKRYLKLQSKLAYIQHRQAEIRKLQHTCLANHMLTLGDRFFVEKMNWPGLAHRAKETSISEKTGRYKRKKRFGKSLANKAPAMFISILKRKCETLGLPGVVEVDTYNLKASQYNHLSDTYEKKSLSERWNYMPISDGSDSSKTKRIQRDLYSAFLLQHTIPQPCSFDKEALRIDYPNFVTMHDAEIHRLESLPKTVTSMGVRRSHS

SEQ ID NO: 2049 - protein, 523 aa, unidentified
  REGION 1..523: note = Category: MG81 effectors
  REGION 1..523: note = Description: MG81-327 effector
  source 1..523: note = uncultivated organism sequence
MPTKQKEGGNRCVLTLPLLTEPWQEHIIEKRFKIIEHLKNQLISIELRKLKNLQRTKAYKNLIKQIESVPKSERTVLYKERNKMLKDAGFSQYTFMDDMAGKKSLMQKHFESHINVQIAHKAAIDVWSSFEKFLFGSGQMIHYQKRGTLKSIASKSPKNGMHYFPESNTFKWSGGKQKKIGQKGEQKKVSIKPISLCLRVSPLKTDYEKEMVANNEIKYYRVVRKWMKTKYKYYLQITFAGKPADKHREISTGRVGIDIGTQTIAIASDKSVKLLELADKVNKNHIKKCELQRKLDRSRRYTNPDNFNPDGTVRRGTKGHKLKWNKSKHYLEIAGKIRELERKNSDIRKYQHTCLANDILAMGNQIYIEPMNYKGLQKKAKETQVDEKGRYKKKKRFGKSLANKAPSMFVTILKTKAEQHGGEVYEVDIMSYRASQCDHTTGEYTKHGLNDRWRILGNGDKVQRDLYSAFLIKNSNKTHDEIDLDKCSKTYDNFKKLHDTEIENIRNEVKLRERKNISSYGIT

SEQ ID NO: 2050 - protein, 512 aa, unidentified
  REGION 1..512: note = Category: MG81 effectors
  REGION 1..512: note = Description: MG81-328 effector
  source 1..512: note = uncultivated organism sequence
MPTKQKEDSNRCVLTLPLLTEPWQEHIIEKRFKIIEHLKNQLISIELRKLKNLQRTKAYKNLIKQIESVPKSERTALYKERNKMLKDAGFSQYTFMDDMAGKKSLMQKHFESHINVQIAHKAAIDVWSSFEKFLFGTGQIVHYQKRGTLSSVASKSPKTGMFYYSDENIFKWSGGGTKPKGGIILCLRVAPVKTNYEKEMVANNEIKYYRVVRKWMKTKYKYYLQITFAGKPADKHHEVSTGRVGIDIGTQTIAIASDKSVKLLELADKVNKNHIKKCELQRKLDRSRRYTNPDNFNPDGTVKRGTKAHKLKWNKSKHYIEIAGKIRELERKNADIRKYQHTCLANDILAMGNQIYIEPMNYKGLQKRAKETQVDEKGRYKKKKRFGKSLANKAPAMFVTILKTKAEQHGGEVYEVDIMSYRASQCDHTTGEYTKHGLNDRWRILGNGDKVQRDLYSAFLIKNSNKTHDEIDLDKCSKTYDSFKKLHDKEIENIRNEVKLRERKNISSYGIA

SEQ ID NO: 2051 - protein, 534 aa, unidentified
  REGION 1..534: note = Category: MG81 effectors
  REGION 1..534: note = Description: MG81-329 effector
  source 1..534: note = uncultivated organism sequence
MGWKSKGRGGKRVKRSSTDTCCLTLPLKLEKWQSDRLEKRFEIGRQIYNTIVHAELKKLRKLERTQQYQEIEQKLENAKQEETKELWKKKRQLLDQNGLSENHFKADMKYYYPHFKDNIASSVAVHGIASQAWTAFEKVLLSKDGKMVHFKKKGELSSLRGYSQAGKSGGIEIIFRGSYVEWKGLKLPLQLSPNNEYETEMLSKRVKYVRILRKDGKTKTHWYAQLALEGKPAVKRDSISGAPKHPVGHGVVGIDIGTRTLAYSADSKVDLIELADRVQNIEQEKMLLQRKLDRSRRATNPENYKPDGSIKQGVKLTWNNSKRYKRIQHQYAMIQHHQADIRKQQHNELANYLLTLGDCFFVEDMDYRALTRKAKKTEISEKTGRYKRKKRFGKSIANKAPSMLIALLDQKCKSLNLEGVKKVDTAVKASQYNHQTDECKAKELKERWNIMPDGERIQRDLYSAFLLQHCRRDLPEYNRKKLQETFGNELYRVFDREALQRDYPKFVEYHRETIQRLSALPKTIASMGIRRSIS

SEQ ID NO: 2052 - protein, 511 aa, unidentified
  REGION 1..511: note = Category: MG81 effectors
  REGION 1..511: note = Description: MG81-330 effector
  source 1..511: note = uncultivated organism sequence
MKKSNTDTCCLTLPLKLEKWQEDRLAKRFEIARQIYNTMVHAELKKLRNIENSQPYRQIQKQIEALNWKNKNDKARLKSLYNDRNKLLNTIGFSEYGFKADIKYYYKHFNDNIGSSVAVHGIAPQVWAAFEKMLFHKEGKKVHYKKKDDIHSLHGYSVTGKSGGVEIIFRKTYIEWKGLKLPLKRSPDNAYETEMLGRRVKYVRLLRKPGKRKDCWYAQLSLKGKPAIKRDPESGKRRHSIGRGAVGLDIGPQTLAYSACGAADLVELADQVQNIEQMKRRLQRKLDRSRRATNPDNYADNGTIRRGVKLTHNKSNRYRRTQRELRYLQHCQAEIRKRQHIELANHLLALGDCFYVEDMAWPSLTHRAKETAISEKTGRIKRKKRFGKSVANKAPATLIGILEQKCNSLGLPGVIKVPTSLRASQYNHQSGEYTSKPLSQRWNNMPDGERIQRDLYSAFLLQHYDPKAGNFDSALLQQDYPQFVQYHHRAIQRLSTVPKTLSSMGIQRSLR

SEQ ID NO: 2053 - protein, 534 aa, unidentified
  REGION 1..534: note = Category: MG81 effectors
  REGION 1..534: note = Description: MG81-331 effector
  source 1..534: note = uncultivated organism sequence
MGRKSTGRGGTLVKKSSTDTCCLTLPLKLEKWQSDRLEKRFEIGRQIYNTVVRAELKKLQQVERTPQYREIEQKLKGAKQEEAKELWKKRTQLLSKSGFSEYGFKSDMKYYYQHFKENIGSSVAVHGIASQVWTAFEKVLLSKDGKMVHFKKKGELSSLRGYSQAGKSGGIEIIFRGSYVEWKGLKLPLQLSPNNEYETEMLSKRVKYVRILRKDGKTKTHWYAQLALEGKPAVKRDSISGAPKHPVGHGVVGIDIGTRTLAYSTDSEVNLLELADRVQNIEQEKRRLQRKMDRSRRAMNPGNYKPDGSIKQGVKLTWNNSKRYKRIQHQYAMIQHHQADIRKQQHNELANYLLTLGDCFFVENMSYCDLAHRANKTEISEKTGRYKRKKRFGKSIANKAPAMLITMLKQKCQSRGLEGVKEVDTHVCASQYNHQTDTCIKKALENRWNIMPDGERIQRDLYSAFLLQHCRRDLPEYNRKELQKEFGEELYRVFDREALQRDYPQFVAYHHMTIQRLSELPHTIPSMGIRRIIS

SEQ ID NO: 2054 - protein, 511 aa, unidentified
  REGION 1..511: note = Category: MG81 effectors
  REGION 1..511: note = Description: MG81-332 effector
  source 1..511: note = uncultivated organism sequence
MAKCSTDTCCLTLPLRLEKWQEDRLAKRFEIARQIYNTMVRAELKKLRAIEQSEPYKANQEKIQALDWKTQADKQALKALYKERDKRLRDGGFSEYGFKSDIKNYYKHFNNNIGSSVAVHGIAPQVWAAFEKMLFKKEGKKVHFKKKGDIRSLRGYSVTGKSGGVEIIFRETYIEWKGLKLPLKLSPDNIYETQMLSYRVKYVRLLRKPGKRKDRWYAQLSLEGKPVIKYNPKTGEVRHPIGKGAVGLDIGPQTLAYSAATGADLVELANQVQNVEQEKRRLQRKLDRSRRATNPGNYADDGTIRRGIALTHNKSKRYLRTQQELKYLQHQQAEIRKRQHTELANHLLSLGDCFYVEKMVWTSLTHRAKETEISEKTGKIKRKKRFGKSVANKAPATLIGILQRKSAALGIPGVIEVPTSVKASQYNHQSGTYTPKPLSQRWNNMPDGERIQRDLYSAFLLQHYDPQTNTFDTNSLHQDYPQFVQYHHDAVLRLYAMPKTPSSMGIKRSLR

SEQ ID NO: 2055 - protein, 511 aa, unidentified
  REGION 1..511: note = Category: MG81 effectors
  REGION 1..511: note = Description: MG81-333 effector
  source 1..511: note = uncultivated organism sequence
MGKSSTDTCCLTLPLKLEKWQEDRLAKRFEIARQIYNTMVRAELKKLDRVKQLPEYRKNQKEIQALDGKNSADRARLKELRANQNRILQKQGFTEYGFKADSKDYYKHFIENIGSSVATHGIAPQVWNAFDKMLFQKDGKVVHFKRYGDVHSLKGGSVAHKSGGAEIMFRKTYIEWKGLKLPLKLSPNNAYEAEMLSYRVKYVRILRTRGKTKDRWYAQLSLEGKPAVKYDSNTGKPVHPVGRGAVGLDIGPQTLAYAAANEANLVELADQVQNIEQEKRRLQRKLDRSRRATNPDNYNENGTIRRGVKLTHNKSKRYCKLQKELSWIQHCQAETRKRQHIALANHLLSLGDCFYVEPMAWPSLTHRAKKTEVSEETGRIKRKKRFGKSVANKAPASLIGILRLKCISLGLTGVVEVPMLLRASQYNHQSKDYAKKSLSQRWNDMPDGNRIQRDLYSAFLLQHYNSQLENFDQETLERDYPQFVRLHNQTIQRLSALPKTPSSMGIRRSVS

SEQ ID NO: 2056 - protein, 512 aa, unidentified
  REGION 1..512: note = Category: MG81 effectors
  REGION 1..512: note = Description: MG81-334 effector
  source 1..512: note = uncultivated organism sequence
MPTKQKEDSNRCVLTLPLLTEPWQEHIIEKRFKIIEHLKNQLISIELRKLKNLQRTKAYKNLMKRIESVPKSERTALYKERNKMLKDAGFSQYTFMDDMAGKKSLMQKHFESHINVQIAHKAAIDVWSSFEKFLFGTGQIVHYQKRGTLSSVASKSPKTGMFYYSDENIFKWSGGGTKPKGGIILCLRVASVKTNYEKEMVANNEIKYYRVVRKWMKTKYKYYLQITFAGKPADKHREISTGRVGIDIGTQTIAIASDKSVKLLELADKVNKNHIKKCELQRKLDRSRRYTNPDNFNPDGTVKRGTKGHKLKWNKSKHYLEIAGKIRELERKNTDIRKYQHTCLANDILAMGNQIYIEPMNYKGLQKRAKETQVDEKGRYKKKKRFGKSLANKAPAMFVTILKTKAEQHGGEVYEVDIMSYRASQCDHTTGEYTKHGLNDRWRILGNGDKVQRDLYSAFLIKNSNKTHDEIDLDKCSKTYDSFKKLHDKEIENIRNEVILRKRRNISSYGIA

SEQ ID NO: 2057 - protein, 512 aa, unidentified
  REGION 1..512: note = Category: MG81 effectors
  REGION 1..512: note = Description: MG81-335 effector
  source 1..512: note = uncultivated organism sequence
MKKSSTDTCCLTLPLKLEKWQEGRLAKRFEIARQLYNTLVHAELKRLAQVKQTAEYRENERKIRTLDWNDPGDQAKLKGLYKERRKSLKTAGFTDYSFTTDMGKYYKHFRDNIGSSVAVHGIAPQVWAAFDKLLFKKGGKKVHYKKPGEVNSVQGYSRTGKSGGTEIMFRGPYIEWKGLKLPLKLSPDNAYETDMLQRRVKLVRLVRRPGKRRDRWYAQLVLEGKPAIKADPVTGKAVHPIGSGPVGLDIGPQTLAYSAAGAAGLVELADRVQNIEQEKRCLQRKMGRSRRATNPDNYAEDGTIRRGVKLTHNKSKRYRRSQQELKYLQRRQAEIRKLQHIQLANHLLSLGDHFYVEKMEWSSLTHRAKKTVISEKTGKPRSKKRFGKSIANKAPAMLIEILRQKCKSLGLPNVVEINPVDIKASQYNHLTGEYVKKSLSRRWNEMQDGEHLQRDLYSAFLLQHYDSMSKALDLDSLARDYPAFVQYHHQEIERLHALPKTPSSMGIRRSIA

SEQ ID NO: 2058 - protein, 536 aa, unidentified
  REGION 1..536: note = Category: MG81 effectors
  REGION 1..536: note = Description: MG81-336 effector
  source 1..536: note = uncultivated organism sequence
MDNVEKEKDGATCCLTLPLKLEKWQSDHLEKRFEIARQLYNTLVHAELKRIHRIERMPEYREIERQIEATTDKKEKWALKNQKKQFLRKNGINRNTFTTDMKRLYKHFNDNIGSNVAQHGIVSQVLTAFEKVYIENQSGEVHFKKPGDLRSVQGYSQKKSGGVEIMFREGKIIWNQQGNNDRKGVAREFPLKLSPDNSYEAEMLKKHVKFVRILRNEGKTKPHWYAQLVLEGKPAIKRDPASGAPKHSVGHGAVGIDIGTRTLAYSADSKVDLIELADRVQNIEQEKLLLQRKLDRSRRATNPENYKPDGTIKKGVKLTRNKSKRYRKIQHQLAMLQHRQADIRKRQHNELANYLLTLGDCFFVEDMDYRALTRKAKKTEISEKTGRYKRKKRFGKSIANKAPSMLIALLDQKCKSLNLEGVKKVDTAVKASQYNHQTDECKAKELKERWNIMPDGERIQRDLYSAFLLQHCRRDLPEYNRKKLQEAFGNELYRVFDREALQRDYPKFVEYHRKTIQRLSALPKTIASMGIRRIIS

SEQ ID NO: 2059 - protein, 512 aa, unidentified
  REGION 1..512: note = Category: MG81 effectors
  REGION 1..512: note = Description: MG81-337 effector
  source 1..512: note = uncultivated organism sequence
MKKSSTDTCCLTLPLKLEKWQEDRLAKRFEIARQLYNTLVHAELKRLVQIKRTAEYLENEQKIRALDRNNPADRAKLQELYKEQRKSLKTAGFTDYSFTTDMGKYYKHFRDNIGSSVAVHGIAPQVWAAFDKLLFKKGGKKVHYKKPGEVNSVQGYSRTGKSGGTEIMFRGPYIEWKGLKLPLKLSPDNAYETDMLQRRVKLVRLVRRPGKRRDRWYAQLVLEGKPAIKADPVTGKAVHPIGSGPVGLDIGPQTLAYSASGAAGLVELADRVQNIEQEKRRLQRKMDRSRRATNPDNYAEDGTIRRGVKLTHYKSKRYRRSQQELKYLQHRQAEIRKLQHIQFANHLLSLGDHFYVEKMEWSSLTHRAKETVISEKTGKPRSKRRFGKFIANKAPAMLIEILRQKCKSLGLPNVVEINPADIKASQYNHLTGEYVKKSLSRRWNEMQDGEHLQRDLYSAFLLQHYDSMSKALDLDSLARDYPAFVQYHHREIERLHALPKTPASMGIRRSIA

SEQ ID NO: 2060 - protein, 536 aa, unidentified
  REGION 1..536: note = Category: MG81 effectors
  REGION 1..536: note = Description: MG81-338 effector
  source 1..536: note = uncultivated organism sequence
MVNDDYNKVLKQFHKLSNRHILVAETDMSCSDIQKVVKLSDRIRKAGNELIGLMKKNYDQLMRTKRYRGLLKLYGSTKNKQKRKMFADQLNEMQKQYNVTWDYCRKSMIHIGKKYSIDAVFALTKAEDVWHGVEKCLYGNGKTLHFSKHGDLPCIRAKQINRGIPISAKNNQLQFKLGKSVFGIQIKDRFQTDEVNAVLDYLAAPEIADCKAVQTLLEEACCISTYRPCYATLVPKLIRGKYRVYLHLAIEGRAKPKYDRFGNPRHKYGKGIIGADIGTQTVAYTSDTETGLKNLSDRGNSIQTSERLERLYYRAMDRSRRATNPQNYNDDGTVKQGKKTWNYSNHYKKLKAKHAELCRINAANRRLAINEDANHLRSIGDVFITEPKNAAKLMKRASKTTVNNKGKINKKKRFGKSIKNRCPGGFQTAVENKFKASGGTYIEVSNNYRASQYDHTADDYIKKKLSDRMYKLADGTLVQRDWYSSFLLYCYDFRTSDIDKDKCAAKFDKCYSMERELIEWIKTNKIKVLNSGIKIA

SEQ ID NO: 2061 - protein, 511 aa, unidentified
  REGION 1..511: note = Category: MG81 effectors
  REGION 1..511: note = Description: MG81-339 effector
  source 1..511: note = uncultivated organism sequence
MAQRHSTPTCCLTLPLQLEKWQEDRLIKRFEIAGKIYNALLNAELKKLHRLEQLPEYKEIQSQLKAYYQNNLPKTAAFKELNNRRSKLLSEHGFSEYAFKGDMKKFYKHFSSNIGSSVATHCIASQVWSAFEKRLFGGGKFVHFKKSGDIRSLKGFSSSRKSGGVEIMFRGDHIEWKGLLLRLKLDPDNQYESEMLSRRIKYVRIIRKPGKAKWRWYAQLSVEGLPAIKRNDETGEPVHPIGRGAVGIDIGPQTIAYVSQTEVALKELADRVQNIEHEKRLIQRKLDRSRRATNPANYADNGTIKRGVKLTRNKSKRYLKLQMELSFLQHKQAEIRKQQHINLANHLLSLGDCFYVEDMAWSSLARKAKETAVSEKTGKYKRKKRFGKSIANKAPASLISILDQKCTSLGLLGVIKVPTSVRASQYNHITKSYEKKTLSQRWNIMPDGRRIQRDIYSAFLLQHVTPQRDGFSDEALQQDYENFVSLHDSVFQQLRLMPKTIASMGIRRTYS

SEQ ID NO: 2062 - protein, 352 aa, unidentified
  REGION 1..352: note = Category: MG81 effectors
  REGION 1..352: note = Description: MG81-340 effector
  source 1..352: note = uncultivated organism sequence
MYTTLNYRIKDSNVSDTLNKWASDANRIWNMCNEINMISWQKFQRPMSGFDLGYSAKGMSKMMAIPQRSIGCICTEYATRTKQFKKRKLNWRSYKKNTGWIPFATQQMKCFSDGIFFNGQKFKLWDYKPFDEKTIKSGSFQQDARGRWYVSITVEIEASSEIPKTGKAVGIDLGLKSLVTLSDGTVYDRVNLTEMYAKKLATAQLAGNLMQVRNIHAKIKNTRKNFYHEISLAIVKNYDEIYIGNISSSKLIKTKMAKSVSDAAWYDFKFMLKYKAERAGKKFVEVNESFSTVTCSSCLERTGPSGLSALGVRSWICSHCGAAHDRDVNAAKNILRSGQCADLRVKGSSLKN

SEQ ID NO: 2063 - protein, 512 aa, unidentified
  REGION 1..512: note = Category: MG81 effectors
  REGION 1..512: note = Description: MG81-341 effector
  source 1..512: note = uncultivated organism sequence
MKKSNTDTCCLTLPLKLEKWQEDRLAKRFEIARQLYNTLVHAELKRLAQVKQTAEYRENERKIRALDWNDPGDQAKLKGLYKERRKSLKTAGFTDYSFTTDMGKYYKHFRDNIGSSVAVHGIAPQVWAAFDKLLFKKGGKKVHYKKPGEVNSVQGYSRTGKSGGTEIMFRGPYIEWKGLKLPLKLSPDNAYETDMLQRRVKLVRLVRRPGKRRDRWYAQLVLEAKPAIKADPVTGKAVHPIGSGPVGLDIGPQTLAYSAAGAAGLVELADRVQNIEQEKRRLQRKMDRSRRATNPDNYAEDGTIRRGVKLTHNKSKRYRRSQQELKYLQHRQAEIRKLQHIQFANHLLSLGDHFYVEKMEWSSLTHRAKKTVISEKTGKPRSKKRFGKSIANKAPAMLIEILRQKCKSLGLPNVVEINPADIKASQYNHLTGEYVKKSLSRRWNEMQDGEHLQRDLYSAFLLQHYDSMSKALDLDSLARDYPAFVQYHHREIERLHALPKTPSSMGIRRSIA

SEQ ID NO: 2064 - protein, 550 aa, unidentified
  REGION 1..550: note = Category: MG81 effectors
  REGION 1..550: note = Description: MG81-342 effector
  source 1..550: note = uncultivated organism sequence
MGWKSKGRGGTLVDNEEKKEDGATCCLTLPLKLEKWQSDHLEKRFEIARQLYNTLVHAELKKKCQVERMPEYQEIMKMIDTASNQKEKWALEKKRKAFLEENGFSRNAFKADMEKYYKHFNDNIGANVALHGITAQVWIAFDKVFVDNYKQKGKVHFKKPGELCSVQGYSQKKSGGKEIMFREDRIIWNQQGNRDRKKVKREFLLKLSPDNPYEAEMLKRHVKFVRILRKDGKTKPHWYAQLVLEGKPAVKRDPASGAPKHPIGHGVVGIDIGTRTLAYSTDKEVNLLELADRVQNIEQEKRRLQRKMDRSRRAMNPENYNSDGTFKRGVKLTRNKSKRYRRIQHQLAMIQHHQADIRKQQHNELANYLLTLGDCFFVENMSYCDLVHRANKTEISEKTGRYKRKKRFGKSIANKAPAMLITMLKQKCQSRGLEGVKEVDTHVRASQYNHQTDTCIEKALENRWNVMPDGERIQRDLYSAFLLQHCKQGLPEYNRKELKKEFGEELYRVFDREALQRDYPQFVAYHHMTIQRLSELPHTIASMGIRRSIS

SEQ ID NO: 2065 - protein, 524 aa, unidentified
  REGION 1..524: note = Category: MG81 effectors
  REGION 1..524: note = Description: MG81-343 effector
  source 1..524: note = uncultivated organism sequence
MAKNNNTDTCVLTLPLRVEKWQEDCLLKRFEAARRIYNSLLNFELKKLRQLERTVEYRQIQSVISSAYRSNTKDSPECKDAFKRREKLISANGISKSGFKSDVKFFYKHFDGLIGSNVAVHCIAVQLWAAFDKYLSGSGKEIHFKRLGDISSLKGYSVKGKSGGREIIFRGQYIEWTRKKKKLLLPLKIDPDNEYEREMLSRRVKYVRIIKKPGKNRLRWYAQLTLEGKPALKYSAETGKPIHSVGKGNVGIDIGPQTVAYASDKEVALLELADRVTNIEHQKKKLQRKLDRSRRATNPDNYKPDGTIKRGVKLTRNKSKRYLKLQSKLAYIQHRQAEIRKLQHTCLANHMLTLGDRFFVEKMNWPGLAHRAKETSISEKTGRYKRKKRFGKSLANKAPAMFISILKRKCETLGLPGVVEVDTYSLKASQYNHLSDTYEKKSLSERWNYMPISDGSDSSKTKRIQRDLYSAFLLQHTIPQPCSFDKEALRIDYPNFVIMHDAEIHRLESLPKTVTSMGVRRSHS

SEQ ID NO: 2066 - protein, 511 aa, unidentified
  REGION 1..511: note = Category: MG81 effectors
  REGION 1..511: note = Description: MG81-344 effector
  source 1..511: note = uncultivated organism sequence
MAARSKTDTCCLTLPLRLEKWQADRLAKRFHIAEQIYNAMLLSWIKKLRVVEQMPEYRAIQSQLQKLYEEDKQKTDAAKELFSRRKEILKKNGFSEYSFKTGIRKYYAHFKENIASNVATHCIASQVWDAFSKKLFGNGGRLHFKRAGDIHSLRGYSKSGESGGVEIIFRGTYIEWNGLRLPLKLDPQNPYEAEMLAKRVKYVRILRTPGKSIDHWYAQLALEGKPTVKRNAATGEPVHPSGRGAVGIDIGPRTIAYVSENEVGLRELADQVENIERDKRRLQRKLDRSRRATNPDNYAPDGTIKRGIKHTHNKSSRYRRMQKELSLLQHRQALIRKRQHTELANHLLSLGDCFYVEDMPWKGLARRTKETTVSPTTGRYRRKKRFGKSISNKAPGTLILILEQKCKSRGVSGVIRVPTNIKASQYNHMTDTYKPKPLSQRWNDMPDGKRIQRDLYSAFLLQHVTPELDGFERTKLIEDYDGFIHLHDKEIHELTLAPKTIASMGISRTRS

SEQ ID NO: 2067 - protein, 349 aa, unidentified
  REGION 1..349: note = Category: MG81 effectors
  REGION 1..349: note = Description: MG81-345 effector
  source 1..349: note = uncultivated organism sequence
MIQRQIKLRLKPKQEALLNDWLWQCTGLFNWAIRKIELDAQGGVYYTKQGFQNILAGHSRKMGMPSHTMQAMLTQAYIGWQRCFKKLAKKPRLKGMRNKLNSIPFPDPLKQPVQNKIKVPGLGQVRFHKQSLPDGKIKCGRIIKRASGWYLALTIDAEPNIKHTFKAKNNRVVGIDPGFKDVIALSDGEKKKATLEYNQGLQRLAQAQRGHDKKLVARLHERIANRKKDRNHKLSRHLVETCELIAFSKDNIKGIQRKFGKSVANANIYQLRQMIDYKSSSCDRRYVEVDGKYSTMTCSACGSRTGPTGIAGLRVRYWTCGCGTKHDRDINAAINTLNTAVGSTVELAA

SEQ ID NO: 2068 - protein, 512 aa, unidentified
  REGION 1..512: note = Category: MG81 effectors
  REGION 1..512: note = Description: MG81-346 effector
  source 1..512: note = uncultivated organism sequence
MKKSSTDTCCLTLPLKLEKWQEDRLAKRFEIARQLYNTLVHAELKRLVQIKRTAEYRENERKIRTLDWNNPAHRTELEKLYEERRKSLKKAGFTDNSFTTDMGKYYKHFRDNIGSSVAVHGIAPQVWAAFDKLLFKKGGKKVHCKRPGEVNSVQGYSRTGKSGGREIMFRGAYIEWKGLKLPLKLSPDNAYETDMLQRRVKLVRLVRRPGKRRDRWYAQLVLEGKPAIKADPVTGKAVHPIGSGPVGLDIGPQTLAYSAAGVAGLVELADRVQNIEQEKRCLQRKMDRSRRATNPDNYAEDGTIRRGVKLTHNKSKRYRRNQQELKYLQHRQAEIRKLQHIQLANHLLSLGDHFYVEKMEWSSLTRRAKKTVISEKTGKPRSKKRFGKSIANKAPAMLIEILRQKCKSLGLPNVVEINPADIKASQYNHLTGEYVKKSLSRRWNDMQDGEHLQRDLYSAFLLQHYDSMSKALDLDSLSRDYPAFVQYHHQEIERLHALPKTPASMGIRRSIA

SEQ ID NO: 2069 - protein, 536 aa, unidentified
  REGION 1..536: note = Category: MG81 effectors
  REGION 1..536: note = Description: MG81-347 effector
  source 1..536: note = uncultivated organism sequence
MVNDDYNKVLKQFHKLSNRHILVAETDMSCSDIQKVVKLSDRIRKAGNELIGLMKKNYDQLMRTKRYRGLLKLYGSTKNKQKRKMFADQLNEMQKQYNVTWDYCRKSMIHIGKKYSIDAVFALTKAEDVWHGVEKCLYGNGKTLHFSKHGDLPCIRAKQINRGIPISAKNNQLQFKLGKSVFGIQIKDRFQTDEVNAVLDYLAAPEIADCKAVQTLLEEACCISTYRPCYATLVPKLIRGKYRVYLHLAIEGRAKPKYDRFGNPRHKYGKGIIGADIGTQTVAYTSDTETGLKNLSDRGNSIQTSERLERLYYRAMDRSRRATNPQNYNDDGTVKQGKKTWNYSNHYKKLKAKHAELCRINVANRRLAINEDANHLRSIGDVFITEPKNAAKLMKRASKTTVNNKGKINKKKRFGKSIKNRCPGGFQTAVENKFKASGGTYIEVSNNYRASQYDHTADDYIKKKLSDRMYKLADGTLVQRDWYSSFLLYCYDFRTSDIDKDKCAAKFDKCYSMERELIEWIKTNKIKVLNSGIKIA

SEQ ID NO: 2070 - protein, 538 aa, unidentified
  REGION 1..538: note = Category: MG81 effectors
  REGION 1..538: note = Description: MG81-348 effector
  source 1..538: note = uncultivated organism sequence
MDNEEKEKDGATCCLTLPLKLEKWQSDHLEKRFEIARQLYNTLVHAELKKKCQVERMPEYQEIMKMIDAASNQKEKWALEKKRKAFLEENGFSRNAFKADMEKYYKHFNDNIGANVALHGITAQVWIAFDKVFVDNYKQKGKVHFKKPGELCSVQGYSQKKSGGKEIMFREDRIIWNQQGNRDRKKVKREFLLKLSPDNPYEAEMLKRHVKFVRILRKDGKTKPHWYAQLVLEGKPAVKRDPISSAPKHPIGHGVVGIDIGTRTLAYSTDSEVNLLELADRVQNIEQEKRRLQRKMDRSRRAMNPGNYKPDGSIKQGVKLTWNNSKRYKRIQHQYAMIQHHQADIRKQQHNELANYLLTLGDCFFVENMSYCDLAHRANKTEISEKTGRYKRKKRFGKSIANKAPAMLITMLKQKCQSRGLEGVKEVDTHVCASQYNHQTDTCIKKALENRWNIMPDGERIQRDLYSAFLLQHCRRDLPEYNRKELQKEFGEELYRVFDREALQRDYPQFVAYHHMTIQRLSELPHTIPSMGIRRIIS

SEQ ID NO: 2071 - protein, 534 aa, unidentified
  REGION 1..534: note = Category: MG81 effectors
  REGION 1..534: note = Description: MG81-349 effector
  source 1..534: note = uncultivated organism sequence
MGWKSKGRGGTRVKKSSTDTCCLTLPLKLEKWQSDRLEKRFEIGRQIYNTVVRAELKKLHQLERTPQYREIEQKLKEAKQEEAKELWKKRTQLLSQSGFTEYGFKSDMKYYYQHFKENIGSSVAVHGIASQVWTAFEKVLFSKDGKMVHFKKKGELSSLRGYSQAGKSGGIEIIFRGSYVEWKGLKLPLKLSPDNDYETEMLSKRVKYVRILRKEGKTKPHWYAQLVLEGKPAIKRDPASGAPKHPVGHGVVGIDIGTRTLAYSADSKVDLIELADRVQNIEQEKMLLQRKLDRSRRATNPENYKPDGTIKKGVKLTRNKSKRYRKIQHQLAMLQHRQADIRKRQHNELANYLLTLGDCFFVEDMDYRALTRKAKKTEISEKTGRYKRKKRFGKSIANKAPSMLIALLDQKCKSLNLEGVKKVDTAVKASQYNHQTDECKAKELKERWNIMPDGERIQRDLYSAFLLQHCKRGLPEYNRKELQKEFGEELYRVFDREALQRDYPQFVVYHHMTMQRLSALPKTIASMGIRRSIS

SEQ ID NO: 2072 - protein, 538 aa, unidentified
  REGION 1..538: note = Category: MG81 effectors
  REGION 1..538: note = Description: MG81-350 effector
  source 1..538: note = uncultivated organism sequence
MNNEEKEKEGATCCLTLPLKLEKWQSDHLEKRFEIARQLYNTLVHAELKKKCQVERMPEYQEIMKMIDTASNQKEKWALEKKRKAFLEENGFSRNAFKADMEKYYKHFNDNIGANVALHGITAQVWIAFDKVFVDNYKQKGKVHFKKPGELCSVQGYSQKKSGGKEIMFREDRIIWNQQGNRDRKKVKREFLLKLSPDNPYEAEMLKRHVKFVRILRKDGKTKPHWYAQLVLEGKPAVKRDPISSAPKHPVGHGVVGIDIGTRTLAYSTDKEVNLLELADHVQNIEQEKRRLQRKMDRSRRATNPENYNPDGTFKRGVKLTRNKSKRYRRIQHQLAMIQHHQADIRKQQHNELANYLLTLGDCFFVENMSYCDLVHRANKTEISEKTGRYKRKKRFGKSIANKAPAMLITMLKQKCQSRGLKGVKEVDTHVRASQYNHQTDTCIEKALENRWNVMPDGERIQRDLYSAFLLQHCKQGLPEYNRKELKKEFGEELYRVFDREALQRDYPQFVAYHHMTIQRLSELPHTIPSMGIRRIIS

SEQ ID NO: 2073 - protein, 511 aa, unidentified
  REGION 1..511: note = Category: MG81 effectors
  REGION 1..511: note = Description: MG81-351 effector
  source 1..511: note = uncultivated organism sequence
MKKSNTDTCCLTLPLKLEKWQEDRLAKRFEIARQIYNTMVHAELKKLRNVENSQPYRQIQKQIEALNWKNQNDKARLKSLYNDRNKLLNTIGFSEYGFKADIKYYYKHFNDNIGSSVAVHGIAPQVWAAFEKMLFHKEGKKVHYKKKDDIHSLHGYSVTGKSGGVEIIFRKTYIEWKGLKLPLKRSPDNAYETEMLDRRVKYVRLLRKPGKRKDCWYAQLSLEGKPAIKRDPESGKRRHSIGRGAVGLDIGPQTLAYSACGAADLVELADQVQNIEQMKRRLQRKLDRSRRATNPDNYADNGTIRRGVKLTHNKSNRYRRTQRELRYLQHCQAEIRKRQHIELANHLLALGDCFYVEDMAWPSLTHRAKETAISEKTGRIKRKKRFGKSVANKAPATLIGILEQKCNSLGLPGVMKVPTSLRASQYNHQSGEYTSKPLSQRWNNMPDGERIQRDLYSAFLLQHYDPKAGNFDSALLQQDYPQFVQYHHRAIQRLSTVPKTLSSMGIQRSLR

SEQ ID NO: 2074 - protein, 334 aa, unidentified
  REGION 1..334: note = Category: MG81 effectors
  REGION 1..334: note = Description: MG81-352 effector
  source 1..334: note = uncultivated organism sequence
MLSKRVKYVRILRKDGKTKTHWYAQLALEGKPAVKRDSISGAPKHPVGHGVVGIDIGTRTLAYSTDKEVNLLELADRVQNIEQEKRRLQRKMDRSRRAMNPENYNSDGTFKRGVKLTRNKSKRYRRIQHQLAMIQHHQADIRKQQHNELANYLLTLGDCFFVENMSYCDLVHRANKTEISEKTGRYKRKKRFGKSIANKAPAMLITMLKQKCQSRGLKGVKEVDTHVRASQYNHQTDTCIEKALENRWNVMLDGERIQRDLYSAFLLQHCKQGLPEYNRKELKKEFGEELYRVFDREALQRDYPQFVAYHHMTIQRLSELPHTIPSMGIRRIIS

SEQ ID NO: 2075 - protein, 540 aa, unidentified
  REGION 1..540: note = Category: MG81 effectors
  REGION 1..540: note = Description: MG81-353 effector
  source 1..540: note = uncultivated organism sequence
MATTDKKNEENLRAYKFRLDPNQAQTIALYQAAGAARYTYNMLTAYNLEVNRLRDDYWKKRHDEGISDADIKKELNALTKEDKRYKQLKYGAFGTQYLTPEKKRHEQAEHRIENGEDPSVVWNQETERSANPWLHTANQRVLVSGLQNASDAWDNFWASRTGKRAGRLVGTPRFKKKGVSRDSFTVPAPEKMGAYGTAYLRGEPAYKQGRRKITDYRHVRLSYLGTIRTFNSTKPLVKAVAAGAKIRRYTVSRNADRWYVSFLVKFSEPIRRSATKRARAAGSVGVDLGVKYLASLSDSEAPQRFPNLKFVEGLPSLENPRWSEASSRRLHKLQRALARSQKGSNRRSRLVKQIARLHHMTALRRESNLHQLTKKLATEYTLVGFEDLNVSGMTASAKGTVENPGKNVAQKSGLNRVVLDAAFGVFRNQLEYKAVWYGSAFEKVDRYFASSQTCSECGRKAKTKLTLRDRVFDCAYCGNMMDRDLNAAVNICREAQRLFDEKLASEDRESLNGRGSRGALRGAETVEASRPPASHRRGSP

SEQ ID NO: 2076 - protein, 536 aa, unidentified
  REGION 1..536: note = Category: MG81 effectors
  REGION 1..536: note = Description: MG81-354 effector
  source 1..536: note = uncultivated organism sequence
MNEKEYKKSLRQFHKHSDRHILVVETDMSFSDIQKVVALSDKIRKAGNELVGLMIKNYDQLIRTKRYRKVRKLYGATEEKKKRKVLASQLNEMQKQYHVTWDDCRTSMIPIGKKYGIDAVFALTKTEDVWRGIEKCLYANGKTLHFSKYGVLPCIRAKQMNRGIPISVKENQLQFKFGESTFGIQRKDRFQSDEIHAVLDYLAEPEIIDKKAIQTFVEKAYCINTYRPCYATLVPKLIRGKYRVYLHLTIEGKAKPKQDRFGNPRHKFGKGIIGADIGTQTVAYTSDTEVGLKNLSERGNSIQKSERLERLYYRAMDRSRRATNPQNYNEDGTIKKGRKSWKYSNHYKRLKAKHAELCRINARNRQLAINEDANSLRSLGDVLITEPKNASKLMKRAKETTKNKKGKFNKKKRFGKSIKSRCPGGFQSTIEKKFEVSGGRYIEVPGNYRASQYDHTADTYVKKKLSDRMYHLADGTLVQRDWYSSFLLYCYDDKIEEINKTKCRTEFEKHYKKEKALIEWIQANQIKILNSGIKTA

SEQ ID NO: 2077 - protein, 554 aa, unidentified
  REGION 1..554: note = Category: MG81 effectors
  REGION 1..554: note = Description: MG81-355 effector
  source 1..554: note = uncultivated organism sequence
MNNEEKEKDGATCCLTLPLKLEKWQSDHLEKRFEIARQLYNTLVHAELKRIHRIERMPEYREIERLIEATTDKKEKWALKNQKKQFLRKNGINRNTFTTDMKRLYKHFNDNIGSNVAQHGIVSQVLTAFEKVYIENQSGEVHFKKPGDLRSVQGYSQKESGGKEIMFRNGKIIWTQQENDDRKKSPKYQQRKKRQNYKGVKGIAREFPVVFSKNNPYEAEMLTKHVKFVRILRKDGKTKPHWYAQLVLEGKPAIKRDPASGAPKHPIGHGVVGIDIGTRTLAYSTDKEVNLLELADHVQNIEQEKRRLQRKMDRSRRATNPENYNPDGTFKRGVKLTRNKSKRYRRIQHQLAMIQHHQADIRKQQHNELANYLLTLGDCFFVENMSYCDLVHRANKTEISEKTGRYKRKKRFGKSIANKAPAMLITMLKQKCQSRGLKGVKEVDTHVRASQYNHQTDTCIEKALENRWNVMPDGERIQRDLYSAFLLQHCKQGLPEYNRKELKKEFGEELYRVFDREALQRDYPQFVAYHHMTIQRLSELPHTIPSMGIRRIIS

SEQ ID NO: 2078 - protein, 512 aa, unidentified
  REGION 1..512: note = Category: MG81 effectors
  REGION 1..512: note = Description: MG81-356 effector
  source 1..512: note = uncultivated organism sequence
MGKSSTDTCCLSLPLKLEKWQEDRLAKRFEIARQIYNTLVHAELKRLSQVKRSQQYREIENKIRALDRNDQEDKKELSLLHKLRDDLLRKSGFNDYGFKADIKYFYKHFGENIGANVAVHGIAPQVWSAFDSVLFKKRGKKVHYKKPGDICSLRGYSVTGKSGGSEIMFRGTYIEWKGLKMPLKLSPDNIYESEMLDHRVKYVRIVRKPGKRKDRWYAQLSLECKPVIKCDPVSGEMRHPVGKGPVGLDIGPQTLAYCALSEAGLVELADQVQDIEREKQRLQRRLDRSRRAANPNNYAADGTIKRGVKLTHNKSKRYCILQRELRYLQQQQAETRKRQHTELANYLLSLGDRFYVEDMNWSSLARRAKKTEISEKTGRYKRKKRFGKSIANKAPGSLIDILKQKCESLGIPGVEKLPTSLLKASQYNHQTGEYTPKPRSQRWNDMPDGERIQRDLYSAFLLQHYDPVSKGYDQAALQRDYPQFLQHHHHSIQRLTAKPKTPSSMGIHQRLR

SEQ ID NO: 2079 - protein, 594 aa, unidentified
  REGION 1..594: note = Category: MG81 effectors
  REGION 1..594: note = Description: MG81-357 effector
  source 1..594: note = uncultivated organism sequence
MVDLKKQLCSSASNSENQGVRFQTVVLYTKFVHKSVQLSPESSVFAVALFVRMMYNTKYQAKRGDPVGEKKNNNNNTDTCVLTLPLRVEKWQEDCLLKRFEAARRIYNSLLNFELKKLRQLERTVEYRQIQSVISSAYRSNTKDSPECKAALKRREKLIDENGLTKNGFKNDVKFFYKHFDGLIGSSVAVHCIAVQLWAAFNKYLCGNGKEIHFKRLGDISSLKGYSVKGKSGGCEIIFRGQYVEWTRKKKKLLLPLKIDPDNEYEREMLSRRVKYVRIIKKPGKNRLRWYAQLTLEGKPALKYSAETGKPIHSVGKGDVGIDIGPQTVAYASDKEVALLELADRVTNIEHQKKKLQRKLDRSRRATNPDNYKPDGTIKRGVKLTRNKSKRYLKLQSKLAYIQHRQAEIRKLQHTCLANHMLTLGDRFFVEKMNWPGLAHRAKETSISEKTGRYKRKKRFGKSLANKAPAMFISILKQKCETLGLPGVVEVDTFRLKASQYNHLSDTCEKKSLSERWNYMPISDGSDSSKTKRIQRDLYSAFLLQHTIPQSCSFDKEALRIDYPNFVTMHDAEIHRLESLPKTITSMGVRRSHS

SEQ ID NO: 2080 - protein, 511 aa, unidentified
  REGION 1..511: note = Category: MG81 effectors
  REGION 1..511: note = Description: MG81-358 effector
  source 1..511: note = uncultivated organism sequence
MKKSNTDTCCLTLPLKLEKWQEDRLAKRFEIARQIYNTMVHAELKKLRNIENSQPYRQIQKQIEALNWKNQNDKAQLKSLYNDRNKLLNTIGFSEYGFKADIKYYYKHFNDNIGSSVAVHGIAPQVWAAFEKMLFHKEGKKVHYKKKDDIHSLHGYSVTGKSGGVEIIFRKTYIEWKGLKLPLKRSPDNAYETEMLGRRVKYVRLLRKPGKRKDCWYAQLSLEGKPAIKRDPESGKRRHSIGRGAVGLDIGPQTLAYSACGAADLVELADQVQNIEQMKRRLQRKLDRSRRATNPDNYADNGTIRRGVKLTHNKSNRYRRTQRELRYLQHCQAEIRKRQHIELANHLLALGDCFYVEDMAWPSLTHRAKETAISEKTGRIKRKKRFGKSVANKAPATLIGILEQKCNSLGLPGVMKVPTSLRASQYNHQSGEYTSKPLSQRWNNMPDGERIQRDLYSAFLLQHYDPKAGNFDSALLQQDYPQFVQYHHRAIQRLSTVPKTLSSMGIQRSLR

SEQ ID NO: 2081 - protein, 512 aa, unidentified
  REGION 1..512: note = Category: MG81 effectors
  REGION 1..512: note = Description: MG81-359 effector
  source 1..512: note = uncultivated organism sequence
MPTKQKEGGNRCVLTLPLLTEPWQEHIIEKRFKIIEHLKNQLISIELRKLKNLQRTKAYKNLIKQIESVPKSERTALYKERNKMLKDAGFSQYTFMDDMAGKKSLMQKHFESHINVQIAHKAAIDVWSSFEKFLFGTGQIVHYQKRGTLSSVASKSPKTGMFYYPDENIFKWSGGGTKPKGGIILCLRVASVKTNYEKEMVANNEIKYYRVVRKWMKTKYKYYLQITFAGKPADKHREISTGRVGIDIGTQTIAIASDKSVKLLELADKVNKNHIKKCELQRKLDRSRRYTNPDNFNPDGTVKRGTKGHKLKWNKSKHYIEIAGKIRELERKNADIRKYQHTCLANDILAMGNQIYIEPMNYKGLQKRAKETQVDEKGRYKKKKRFGKSLANKAPAMFVTILKTKAEQHGGEVYEVDIMSYRASQCDHTTGEYTKHGLNDRWRILGNGDKVQRDLYSAFLIKNSNKTHDEIDLDKCSKTYDNFKKLHDKEIENIRNEVKLRERKNISSYGIA

SEQ ID NO: 2082 - protein, 538 aa, unidentified
  REGION 1..538: note = Category: MG81 effectors
  REGION 1..538: note = Description: MG81-360 effector
  source 1..538: note = uncultivated organism sequence
MNNEEKEKEGATCCLTLPLKLEKWQSDHLEKRFEIARQLYNTLVHAELKKKCQVERMPEYQEIMKMIDTASNQKEKWALEKKRKAFLEENGFSRNAFKADMEKYYKHFNDNIGANVALHGITAQVWIAFDKVFVDNYKQKGKVHFKKPGELCSVQGYSQKKSGGKEIMFREDRIIWNQQGNRDRKKVKREFLLKLSPDNPYEAEMLKRHVKFVRILRKDGKTKPHWYAQLVLEGKPAVKRDPASGAPKHPIGHGVVGIDIGTRTLAYSTDKEVNLLELADHVQNIEQEKRRLQRKMDRSRRATNPENYNPDGTFKRGVKLTRNKSKRYRRIQHQLAMIQHHQADIRKQQHNELANYLLTLGDCFFVENMSYCDLVHRANKTEISEKTGRYKRKKRFGKSIANKAPAMLITMLKQKCQSRGLKGVKEVDTHVRASQYNHQTDTCIEKALENRWNVMPDGERIQRDLYSAFLLQHCRRDLPEYNRKELQKEFGEELYRVFDREALQRDYPQFVAYHHMTIQRLSELPHTIPSMGIRRIIS

SEQ ID NO: 2083 - protein, 397 aa, unidentified
  REGION 1..397: note = Category: MG81 effectors
  REGION 1..397: note = Description: MG81-361 effector
  source 1..397: note = uncultivated organism sequence
MAKCSTDTCCLTLPLRLEKWQEDRLAKRFEIARQIYNTMVRAELKKLRAMEQSEPYKANQEKIQALDWKTQADKQALKALYKERDKLLRDGGFSEYGFKSDIKNYYKHFNNNIGSSVAVHGIAPQVWAAFEKMLFKKEGKKVHFKKKGDIHSLRGYSAAGKSGGVEIIFRETYIEWKGLKLPLKLSPDNIYETQMLSYRVKYVRLLRKPGKRKDRWYAQLSLEGKPVIKYNPKTGEVRHPIGKGAVGLDIGPQTLAYSAATGADLVELANQVQNVEQEKRRLQRKLDRSRRATNPGNYADDGTIRRGIALTHNKSKRYLRTQQELKYLQHQQAEIRKRQHTELANHLLSLGDCFYVEKMVWTSLTHRAKETEISEKPEKSKGKRGSGNPSLTKLQPR

SEQ ID NO: 2084 - protein, 335 aa, unidentified
  REGION 1..335: note = Category: MG81 effectors
  REGION 1..335: note = Description: MG81-362 effector
  source 1..335: note = uncultivated organism sequence
MAKCSTDTCCLTLPLRLEKWQEDRLAKRFEIARQIYNTMVRAELKKLRAMEQSEPYKANQEKIQALDWKTQTDKQALKALYKERDKLLRDGGFSEYGFKSDIKNYYKHFNNNIGSNVAFHGIAPQVWAAFEKMLFKKEGKKVHFKKKGDIHSLRGYSAAGKSGGVEIIFRETYIEWKGLKLPLKLSPDNIYETQMLSYRVKYVRLLRKPGKRKDRWYAQLSLEGKPVIKYNPKTGEVRHPIGKGAVGLDIGPQTLAYSAATGADLVELANQVQNVEQEKRRLQRKLDRSRRATNPGNYADDGTIRRGIALTHNKSKRYLRTQQELKYLQHQQAEI

SEQ ID NO: 2085 - protein, 512 aa, unidentified
  REGION 1..512: note = Category: MG81 effectors
  REGION 1..512: note = Description: MG81-363 effector
  source 1..512: note = uncultivated organism sequence
MPAKQKEGGNRCVLTLPLLTEPWQEHIIEKRFKIIEHLKNQLISIELRKLKNLQRTKAYKNLIKQIESVPKSERTALYKERNKMLKDAGFSQYTFMDDMAGKKSLMQKHFESHINVQIAHKAAIDVWSSFEKFLFGTGQIVHYQKRGTLSSVASKSPKTGMFYYSDENIFKWSGGGTKPKGGIILCLRVAPVKTNYEKEMVANNETKYYRVVRKWMKTKYKYYLQITFAGKPADKHREISTGRVGIDIGTQTIAIASDKSVKLLELADKVNKNHIKKCELQRKLDRSRRYTNPDNFNPDGTVKRGTKGHKLKWNKSKHYIEIAGKIRELERKNADIRKYQHTCLANDILAMGNQIYIEPMNYKGLQKRAKETQVDEKGRYKKKKRFGKSLANKAPAMFVTILKTKVEQHGGEVYEVDIMSYRASQCDHTTGEYTKHGLNDRWRILGNGDKVQRDLYSAFLIKNSNKTHDEIDLDKCSKTYDNFKKLHDKEIENIRNEVKLRERKNISSYGIA

SEQ ID NO: 2086 - protein, 512 aa, unidentified
  REGION 1..512: note = Category: MG81 effectors
  REGION 1..512: note = Description: MG81-364 effector
  source 1..512: note = uncultivated organism sequence
MPTKQKEGGNRCVLTLPLLTEPWQEHIIEKRFKIIEHLKNQLISIELRKLKNLQRTKAYKNLMKRIESVPKSERTALYKERNKMLKDAGFSQYTFMDDMAGKKSLMQKHFESHINVQIAHKAAIDVWSSFEKFLFGSGQMIHYQKRGTLSSVASKSPKTGMFYYSDENIFKWSGGGTKPKGGIILCLRVASVKTNYEKEMVANNEIKYYRVVRKWMKTKYKYYLQITFAGKPADKHREISTGRVGIDIGTQTIAIASDKSVKLLELADKVNKNHIKKCELQRKLDRSRRYTNPDNFNPDGTVKRGTKGHKLKWNKSKHYLEIAGKIRELERKNADIRKYQHTCLANDILAMGNQIYIEPMNYKGLQKRAKETQVDEKGRYKKKKRFGKSLANKAPAMFVTILKTKAEQHGGEVYEVDIMSYRASQCDHTTGEYTKHGLNDRWRILGNGDKVQRDLYSAFLIKNSNKTHDEIDLDKCSKTYDNFKKLHDKEIENIRNEVILRERRNISSYGIA

SEQ ID NO: 2087 - protein, 511 aa, unidentified
  REGION 1..511: note = Category: MG81 effectors
  REGION 1..511: note = Description: MG81-365 effector
  source 1..511: note = uncultivated organism sequence
MGKSSTDTCCLTLPLKLEKWQEDRLAKRFEIARQIYNTMVRAELKRLRQVEQSPQYRSNKKAIQALDWKNTADKPKLKTLYRERDKLLKGGGFTEYGFKSDIKNFYKHFVENIGSSVAVHGIAPQVWAAFERVLFKKEGKKVHFKKTGDIRSLRGYSVTGKSGGVEIIFRGSYIEWKGLNLPLKLSPDNAYETEMLSYRVKYVRILRKPGKTRDRWYAQLSLEGKPAIKRNPASGNPVHPVGQGAVGLDIGPQTLAYAAEKEANLVELADRVQNIEREKHLLQRKMDRSRRAANPDNYAENGTIRRGVKLTHNKSKRYLRLQRELCYLQHCQAETRKRQHTELANHLLSLGSCFYVEDMAWPSLTHRAKKTEISDKTGRIKRKKRFGKSIANKAPAALINILRTKCVSLGIPGVVEVPTSLKASQYNHQSKEYTPKPLSQRWNDMPDGSRIQRDLYSAFLLQHYDPQSGNFDQASLEADYPQFVQLHNQSIQRLLTVPKTPSSMGIRRSVS

SEQ ID NO: 2088 - protein, 512 aa, unidentified
  REGION 1..512: note = Category: MG81 effectors
  REGION 1..512: note = Description: MG81-366 effector
  source 1..512: note = uncultivated organism sequence
MKKSSTDTCCLTLPLKLEKWQEDRLAKRFEIARQLYNTLVHAELKRLAQVKQTAEYRENERKIRTLDWNDPGDQAKLKGLYKERRKSLKTAGFTDYSFTTDMGKYYKHFRDNIGSSVAVHGIAPQVWAAFDKVLFKKGGKKVHYKKPGEVNSVQGYSRTGKSGGTEIMFRGPYIEWKGLKLPLKVSPDNAYETDMLQRRVKLVRLVRRPGKRRDRWYAQLVLEGKPAIKADPVTGKAVRPIGSGPVGLDIGPQTLAYSAAGVAGLVELADRVQNIEQEKRCLQRKMDRSRRATNPDNYAEDGTIRRGVKLTHNKSKRYRRSQQELKYLQHRQAEMRKLQHIQLANHLLSLGDHFYVEKMEWSSLTHRAKKTVISEKTGKPRSKKRFGKSIANKAPAMLIEILRQKCKSLGLPNVVEINPADIKASQYNHLTGEYVKKSLSRRWNEMQDGEHLQRDLYSAFLLQHYDSMSKALDLDSLARDYPAFVQYHHREIERLHALPKTPSSMGIRRSIA

SEQ ID NO: 2089 - protein, 511 aa, unidentified
  REGION 1..511: note = Category: MG81 effectors
  REGION 1..511: note = Description: MG81-367 effector
  source 1..511: note = uncultivated organism sequence
MAKCSTDTCCLTLPLRLEKWQEDRLAKRFEIARQIYNTMVRAELKKLRAIEQSEPYKANQEKIQALDWKTQADKQALKALYKERDKLLRDGGFSEYGFKSDIKNYYKHFNNNIGSSVAVHGIAPQVWAAFEKMLFKKEGKKAHFKKKGDIRSLRGYSVAGKSGGVEMIFRETYIEWKGLKLPLKLSPDNIYETQMLSYRVKYVRLLRKPGKRKDRWYAQLSLEGKPVIKYNPKTGEVRHPIGKGAVGLDIGPQTLAYSAATGADLVELANQVQNVEQEKRRLQRKLDRSRRATNPGNYADDGTIRRGIALTHNKSKRYLRTQQELKYLQHQQAEIRKRQHTELANHLLSLGDCFYVEKMAWTSLTHRAKETEISEKTGKIKRKKRFGKSVANKAPATLIGILQRKSAALGIPGVIEVPTSVKASQYNHQSGTYTPKPLSQRWNNMPDGERIQRDLYSAFLLQHYDPQTNTFDANSLHQDYPQFVQYHHDAVLRLYAMPKTPSSMGIKRSLR

SEQ ID NO: 2090 - protein, 338 aa, unidentified
  REGION 1..338: note = Category: MG81 effectors
  REGION 1..338: note = Description: MG81-368 effector
  source 1..338: note = uncultivated organism sequence
MDYLAQPEIIDDKAVKILQDEACCISTYRPCYATLVPKFIRGKYRVYLHLVIEGKAKPKYDSSGKPRHKYGKGVVGADIGTQTVAYTSDTETGLKNLSERGNSIQKSERLERLYYRAMDRSRRATNPKNYNADGTIKKGKKKWTYSRHYKKLKAKHAELCRINAINRQLAINEDANHLRSLGDIFVTEPKNAARLMKRAKETTVNNKGRINRKKRFGKSVKNRCPGGFQTAVENKFKTSGGTYIEVPNNYRASQYDHTADDYIKKKLSDRMYKLTDGTLVQRDWYSSFLLYCYNYRTNDIDKKKCAAEFKKCYSMEKEFIEWIKANKIKVLNSGIKTA

SEQ ID NO: 2091 - protein, 528 aa, unidentified
  REGION 1..528: note = Category: MG81 effectors
  REGION 1..528: note = Description: MG81-369 effector
  source 1..528: note = uncultivated organism sequence
MILLTKNNNNTDTCVLTLPLRVEKWQEDCLLKRFEAARRIYNSLLNFELKKLRQLERTVEYRQIQSVISSAYRSNTKDSPECKDAFKRREKLISANGISENGFKSDVKFFYKHFDGLIGSNVAVHCIAVQLWAAFDKYLSGSGKEIHFKRLGDISSLKGYSVKGKSGGREIIFRGQYIEWTRKKKKLLLPLKIDPDNEYEREMLSRRVKYVRIIKKPGKNRLRWYAQLTLEGKPALKYSAETGKPIHSVGKGNVGIDIGPQTIAYASDKEVALLELADRVTNIEHQKKKLQRKLDRSRRATNPDNYKPDGTIKRGVKLTRNKSKRYLKLQSKLAYIQHRQAEIRKLQHTCLANHMLTLGDRFFVEKMNWPGLAHRAKETSISEKTGRYKRKKRFGKSLANKAPAMFISILKRKCETLGLPGVVEVDTFRLRASQYNHLSDTYEKKSLSERWNYMPISDGSDSSKTKRIQRDLYSAFLLQHTIPQPCSFDKEALRIDYPNFVIMHDAEIHRLESLPKTVTSMGVRRSHS

SEQ ID NO: 2092 - protein, 530 aa, unidentified
  REGION 1..530: note = Category: MG81 effectors
  REGION 1..530: note = Description: MG81-370 effector
  source 1..530: note = uncultivated organism sequence
MILLAKNNNNNNTDTCVLTLPLRVEKWQEDCLLKRFEAARRIYNSLLNFELKKLRQLERTVEYRQIQSVISSAYRSNTKDSPECKDAFKRREKLISANGISENGFKSDVKFFYKHFDGLIGSNVAVHCIAVQLWAAFDKYLSGSGKEIHFKRLGDISSLKGYSVKGKSGGREIIFRGQYVEWTRKKKKLLLPLKIDPDNEYEREMLSRRVKYVRIIKKPGKNRLRWYAQLTLEGKPALKYSAETGKPIHSVGKGNVGIDIGPQTVAYASDKEVALLELADRVTNIEHQKKKLQRKLDRSRRATNPDNYKPDGTIKRGVKLTRNKSKRYLKLQSKLAYIQHRQAEIRKLQHTCLANHMLTLGDRFFVEKMNWPGLAHRAKETSISEKTGRYKRKKRFGKSLANKAPAMFISILKRKCETLGLPGVVEVDTYNLKASQYNHLSDTYEKKSLSERWNYMPISDGSDSSKTKRIQRDLYSAFLLQHTIPQPCSFDKEALREDYPNFVTMHDAEIHRLESLPKTVTSMGVRRSHS

SEQ ID NO: 2093 - protein, 519 aa, unidentified
  REGION 1..519: note = Category: MG81 effectors
  REGION 1..519: note = Description: MG81-371 effector
  source 1..519: note = uncultivated organism sequence
MIQPELKAYRRCSDRHVLVLETNLTYVEKCQIFHYADLVRKAGNELTGIMKKRYDQLVRTKRYRKLKSLYKRYKDADNKKALKDVCDQMKEMQKQYDVTWDYCRTSMIPIGKKYGIDAVFALTKAEDVFRGIEKCLYSDGETVHFKKRGDLPCIRAKQINRGIIMKQMNFKFKNIEFGVKIKDRYEQEEVNAILYYLKHAEFMDSIAANTYKETNICISTYRPCYVSIVCKKIRGKLRVYVHITIEGLSKPKQDRFGNVKHNKGKGIVGCDIGTQTIAYTTETKAGLKNLAERGSCIEVNERKERRIYRAMDRSRRAMNPDNYNEDGTIKKGKKKWVLSNRYKKLRTKHTELCRINATNRHLAINADVNELRSLGDIFVTETKNAKKLQKKAKTGKRKKRFGRSIKNRCPGYFQSQAKRKFRIYVEVPNDYKASQYDHTSDEYVKKSLSQRMYKLQDGTMVQRDLYSSFLLYCIDLSTNKIDKNKCIHEFEKQYKNQNETIEYIQMNQIKVMNSGIRVN

SEQ ID NO: 2094 - protein, 680 aa, unidentified
  REGION 1..680: note = Category: MG81 effectors
  REGION 1..680: note = Description: MG81-372 effector
  source 1..680: note = uncultivated organism sequence
MKKSSTDTCCLTLPLKLEKWQSDRLEKRFEIGRQIYNTVVRAELKKLQQVERTPQYREIEQKLKGAKQEEAKELWKKRTQLLSKSGFSEYGFKSDMKYYYQHFKENIGSSVAVHGIASQVWTAFEKVLFSKDGKMVHFKKKGELSSLRGYSQAGKSGGIEIIFRGSYVEWKGLKLPLKLSPDNDYETEMLSKRVKYVRILRKEGKTKPHWYAQLVLEGKPAIKRDPASGAPKHPVGHGVVGIDIGTRTLAYSADSKVDLIELADRVQNIEQEKLLLQRKLDRSRRATNPGNYNPDGTIKKGVKLTRNKSKRYRKIQHQLAMLQHRQADIRKRQHNELANYLLTLGDCFFVEDMDYRALTRKAKKTEISEKTGRYKRKKRFGKSIANKAPSMLIALLDQKCESLNLEGVKKVDTAVKASQYNHQTDECKAKELKERWNIMPDGERIQRDLYSAFLLQHCKRGLPEYNRKKLQEAFGNELYRSLIVKHSKGTIRNLWNTIGRRFNAFPCCPKRLPAWASGESSANMKIRCGSHQQNRSIVRPGLSLMATKVALTAEEFRENSQRSIDLFNTEKLSTNSTHVRKKCILQFCAFLPLQSARSVWRQSLYPGDVEKVPQVAICTERVEAKEPASHGGRKRKSCNLHGACGGKARQGDPQRGQGGVAICTERVKAKYSHYAYSPLT

SEQ ID NO: 2095 - protein, 524 aa, unidentified
  REGION 1..524: note = Category: MG81 effectors
  REGION 1..524: note = Description: MG81-373 effector
  source 1..524: note = uncultivated organism sequence
MAKNNNTDTCVLTLPLRVEKWQEDCLLKRFEAARRIYNSLLNFELKKLRQLERTVEYRQIQSVISSAYRSNTKDSPECKDAFKRREKLISANGISEYGFKSDVKFFYKHFDGLIGSNVAVHCIAVQLWAAFDKYLRGSGKEIHFKRLGDISSLKGYSVKGKSGGREIIFRGQYIEWTRKKKKLLLPLKIDPDNEYEREMLSRRVKYVRIIKKPGKNRLRWYAQLTLEGKPALKYSAGTGKPIHSVGKGNVGIDIGPQTVAYASDKEVALLELADRVTNIEHQKKKLQRKLDRSRRATNPDNYKPDGTIKRGVKLTRNKSKRYLKLQSKLAYIQHRQAEIRKLQHTCLANHMLTLGDRFFVEKMNWPGLAHRAKETSISEKTGRYKRKKRFGKSLANKAPAMFISILKRKCETLGLPGVVEVDTYSLKASQYNHLSDTYEKKSLSERWNYMPISDGSDSSKTKRIQRDLYSAFLLQHTIPQPCSFDKKALRIDYPNFVTMHDAEIHRLESLPKTITSMGVRRSHS

SEQ ID NO: 2096 - protein, 534 aa, unidentified
  REGION 1..534: note = Category: MG81 effectors
  REGION 1..534: note = Description: MG81-374 effector
  source 1..534: note = uncultivated organism sequence
MGWKSKGRGGTLVKKSSTDTCCLTLPLKLEKWQSDRLEKRFEIGRQIYNTVVRAELKKLQQVERTPQYREIEQKLKEAKQEEAKELWKTRTQLLSKSGFSEYGFKSDMKYYYQHFKENIGSSVAVHGIASQVWTAFEKVLFSKDGKMVHFKKKGELSSLRGYSQAGKSGGIEIIFRGSYVEWKGLKLPLKLSPDNDYETEMLSKRVKYVRILRKEGKTKPHWYAQLVLEGKPAIKRDPASGAPKHPVGHGVVGIDIGTRTLAYSADSKVDLIELADRVQNIEQEKMLLQRKLDRSRRATNPENYKPDGTIKKGVKLTRNKSKRYRKIQHQLAMLQHRQADIRKRQHNELANYLLTLGDCFFVEDMDYRALTRKAKKTEISEKTGRYKRKKRFGKSIANKAPSMLIALLDQKCKSLNLEGVKKVDTAVKASQYNHQTDECKAKELKERWNIMPDGERIQRDLYSAFLLQHCRRDLPEYNRKKLQETFGNELYRVFDREALQRDYPKFVEYHRETIQRLSALPKTIASMGIRRSIS

SEQ ID NO: 2097 - protein, 537 aa, unidentified
  REGION 1..537: note = Category: MG81 effectors
  REGION 1..537: note = Description: MG81-375 effector
  source 1..537: note = uncultivated organism sequence
MIIDGGYKKLLKQFHKHSDRHILVIETDMPYSDILKVVALSDKIRKAGNELVGLMKKNYAQLLRTKRYRKLLFLYGNTEDKDKRKIYANQLNEMQKIYNVTWNYCRTSMIPIGKKYGIDAVFALTKAEDVWRGMEKCLYGNGNTVHFSKHGDLPCIRAKQISRGIPISVRNDKLQFKLGKTSFGIQVNDRFQQDEVNAVLSYLVEPEIMDNKAVNTLIEDAYCIDTYRPCYATLVPKMIRGKYRVYLHLTIEGKTKLKYDKHGNPRYKYGKGIIGADIGTQTVAYTSDTEVGLKNLSERGNSIQTSERKERLLYRAMDRSRRATNPQNFNEDGTVKKGRKTWKYSNHYKKLKTKHSELCRINAVNRQLAINEDANHLRGLGDTLVTEPKNASKLMKRAKETTVNSKGKFNKKKRFGKSIKNRCPSGFQTTVEKKFKTTGGTYIEVPNNYRASQYDHTVDDYIKKKLSDRLYKLQDGTEVQRDWYSSFLLYCYDYKIQNIDKNKCITEFDNCYKKEKALITWIKTHKIKVLNSGIKTA

SEQ ID NO: 2098 - protein, 511 aa, unidentified
  REGION 1..511: note = Category: MG81 effectors
  REGION 1..511: note = Description: MG81-376 effector
  source 1..511: note = uncultivated organism sequence
MGKSSTDTCCLTLPLKLEKWQEDRLAKRFEIARQIYNTMVRAELKKLDRVKQLPEYRKNQKEIQALDWKNSADKQRLKELYGNQRKILQKQGFTEYGFKSDSKDYYKHFIENIGSSVATHCIAPQVWNAFDKMLFQKDGKVVHFKRYGDVHSLKGGSVAHKSGGTEIMFRKTYIEWKGLKLPLKLSPNNAYEAEMLSYRVKYVRILRTRGKTKDRWYAQLSLEGKPAVKYDSNTGKPVHPVGRGAVGLDIGPQTLAYAAANEANLVELADQVQNIEQEKRRLQRKLDRSRRATNPDNYNENGTIRQGVKLTHNKSKRYCKLQKELSWIQHCQAETRKRQHIALANHLLSLGDCFYVEPMAWPSLTHRAKKTEVSEKTGRIKRKKRFGKSVANKAPASLIGILKLKCISLGLTGVVEVPMLLKASQYNHQSKDYAKKSLSQRWNDMPDGNRIQRDLYSAFLLQHYNSQSESFDQETLERDYPQFVRLHNQTIQRLSALPKTPSSMGIRRSVS

SEQ ID NO: 2099 - protein, 353 aa, unidentified
  REGION 1..353: note = Category: MG81 effectors
  REGION 1..353: note = Description: MG81-377 effector
  source 1..353: note = uncultivated organism sequence
MSGKSGGTEIIFHKTYIAWKGLTLPLKLSPDNAYEKEMLMRRIKYVRILRKPGKHKDRWYAQLSLEGNPVVKLDPVSGLPRHPIGKGAVGIDIGPQTLAYSAEGGADLVELADQVQCIEQEKSRLQRKMDRSRRASNPDNYAQDGTIKRGVKLTHNKSRRYCKLQKELAYMLYRQAETRKRQHRELINRLLTMGDCFYIEDMHWNSLAHRAKKTEISEKTGRYKRKKRFGKSIANKAPAMLVDMLKQKCKSLELDVVMVNTSLKASQYNHQTGKYEKKTLSQRWNHMPDGEQIQRDLYSAFLLQHVVPEKNAFDNEALCREYPKFVQYHHEVIERLRSLPKTISSMGIRRSVS

SEQ ID NO: 2100 - protein, 512 aa, unidentified
  REGION 1..512: note = Category: MG81 effectors
  REGION 1..512: note = Description: MG81-378 effector
  source 1..512: note = uncultivated organism sequence
MPTKQKEDSNRCVLTLPLLTEPWQEHIIEKRFKIIEHLKNQLISIELRKLKKLQRTKAYKNLIKQIESVPKSERTVLYKKRNKMLKDAGFSQYTFMDDMAGKKSLMQKHFESHINVQIAHKAAIDVWSSFEKFLFGSGQMIHYQKRGTLSSVASKSPKTGMFYYSDENIFKWSGGGTKPKGGIILCLRVASVKTNYEKEMVANNEIKYYRVVRKWMKTKYKYYLQITFAGKPADKHHEVSTDRVGIDIGTQTIAIASDKSVKLLELADKVNKNHIKKCELQRKLDRSRRYTNPDRFNPDGTVKRGTKGHKLKWNKSKHYIEIAGKIRELERKNADIRKYQHTCLANDILAMGNQIYIEPMNYKGLQKRAKETQVDEKGRYKKKKRFGKSLANKAPAMFVTILKTKAEQHGGEVYEVDIMSYRASQCDHTTGEYTKHGLNDRWRILGNGDKVQRDLYSAFLIKNSNKTHDEIDLDKCSKTYDNFKKLHDKEIENIRNEVILRKRRNISSYGIA

SEQ ID NO: 2101 - protein, 538 aa, unidentified
  REGION 1..538: note = Category: MG81 effectors
  REGION 1..538: note = Description: MG81-379 effector
  source 1..538: note = uncultivated organism sequence
MDNEEKEKDGATCCLTLPLKLEKWQSDHLEKRFEIARQLYNTLVHAELKKKCQVERMPEYQEIMKMIDAASNQKEKWALEKKRKAFLEENGFNRNAFKADMEKYYKHFNDNIGANVALHGITAQVWIAFDKVFVDNYKQKGKVHFKKPGELCSVQGYSQKKSGGKEIMFREDRIIWNQQGNRDRKKVKREFLLKLSPDNPYEAEMLKRHVKFVRILRKDGKTKTHWYAQLALEGKPAVKRDSISGAPKHPVGHGVVGIDIGTRTLAYSTDKEVNLLELADRVQNIEQEKRRLQRKMDRSRRAMNPGNYKPDGSIKQGVKLTWNNSKRYKRIQHQYAMIQHHQADIRKQQHNELANYLLTLGDCFFVENMSYCDLAHRANKTEISEKTGRYKRKKRFGKSIANKAPAMLITMLKQKCQSRGLEGVKEVDTHVCASQYNHQTDTCIKKALENRWNIMPDGERIQRDLYSAFLLQHCRRDLPEYNRKELQKEFGEELYRVFDREALQRDYPQFVAYHHMTIQRLSELPHTIPSMGIRRIIS

SEQ ID NO: 2102 - protein, 388 aa, unidentified
  REGION 1..388: note = Category: MG81 effectors
  REGION 1..388: note = Description: MG81-380 effector
  source 1..388: note = uncultivated organism sequence
MVHFKKKGELSSLRGYSQAGKSGGIEIIFRGSYVEWKGLKLPLQLSPNNEYETEMLSKRVKYVRILRKDGKTKTHWYAQLALEGKPAVKRDSISGAPKHPVGHGVVGIDIGTRTLAYSTDSEVNLLELADRVQNIEQEKRRLQRKMDRSRRAMNPGNYKPDGSIKQGVKLTWNNSKRYKRIQHQYAMIQHHQADIRKQQHNELANYLLTLGDCFFVENMSYCDLAHRANKTEISEKTGRYKRKKRFGKSIANKAPAMLITMLKQKCQSRGLEGVKEVDTHVCASQYNHQTDTCIKKALENRWNIMPDGERIQRDLYSAFLLQHCRRDLPEYNRKELQKEFGEELYRVFDREALQRDYPQFVAYHHMTIQRLSELPHTIPSMGIRRIIS

SEQ ID NO: 2103 - protein, 530 aa, unidentified
  REGION 1..530: note = Category: MG81 effectors
  REGION 1..530: note = Description: MG81-381 effector
  source 1..530: note = uncultivated organism sequence
MILLAKNNNNNNTDTCVLTLPLRVEKWQEDCLLKRFEAARRIYNSLLNFELKKLRQLERTVEYRQIQSVISSAYRSNTKDSPECKDAFKRREKLISANGISEYGFKSDVKFFYKHFDGLIGSSVAVHCIAVQLWAAFDKYLRGSGKEIHFKRLGEISSLKGYSVKGKSGGLEIIFRGQYVEWTRKKKKLLLPLKIDPDNEYEREMLSRRVKYVRIIKKPGKNRLRWYAQLTLEGKPALKYSAETGKPIHSVGKGDVGIDIGPQTVAYASDKEVALLELADRVTNIEHQKKKLQRKLDRSRRATNPDNYKPDGTIKRGVKLTRNKSKRYLKLQSKLAYIQHRQAEIRKLQHTCLANHMLTLGDRFFVEKMNWPGLAHRAKETSISEKTGRYKRKKRFGKSLANKAPAMFISILKRKCETLGLPGVVEVDTFRLKASQYNHLSDTYEKKSLSERWNYMPISDGSDSSKTKRIQRDLYSAFLLQHTIPQPCSFDKEALREDYPNFVTMHDAEIHRLEYLPKTITSMGVRRSHS

SEQ ID NO: 2104 - protein, 561 aa, unidentified
  REGION 1..561: note = Category: MG81 effectors
  REGION 1..561: note = Description: MG81-382 effector
  source 1..561: note = uncultivated organism sequence
MSNLLFLLENEEKEKDGATCCLTLPLKLEKWQSDHLEKRFEIARQLYNTLVHAELKRIHRIERMPEYREIERQIEATTDKKEKWALKNQKKQFLRKNGINRNTFTTDMKRLYKHFNDNIGSNVAQHGIVSQVLTAFEKVYIENQSGEVHFKKPGDLRSVQGYSQKESGGKEIMFRNGKIIWTQQENDDRKKSPKYQQRKKRQNYKGVKGIAREFPVVFSKNNPYEAEMLTKHVKFVRILRKDGKTKPHWYAQLVLEGTPVAKYDPISGAPKHPVGHGVVGIDIGTRTLAYSTDSEVNLLELADRVQNIEQEKRRLQRKMDRSRRAMNPENYNSDGTFKRGVKLTRNKSKRYRRIQHQLAMIQHHQADIRKQQHNELANYLLTLGDCFFVENMSYCDLVHRANKTEISEKTGRYKRKKRFGKSIANKAPAMLITMLKQKCQSRGLKGVKEVDTHVRASQYNHQTDTCIEKALENRWNVMPDGERIQRDLYSAFLLQHCKQGLPEYNRKELKKEFGEELYRVFDREALQRDYPQFVAYHHMTIQRLSELPHTIPSMGIRRIIS

SEQ ID NO: 2105 - protein, 522 aa, unidentified
  REGION 1..522: note = Category: MG81 effectors
  REGION 1..522: note = Description: MG81-383 effector
  source 1..522: note = uncultivated organism sequence
MKKSSTDTCCLTLPLKLEKWQSDRLEKRFEIGRQIYNTVVRAELKKLQQVERTPQYREIEQKLKGAKQEEAKELWKKRTQLLSKSGFSEYGFKSDMKYYYQHFKENIGSSVAVHGIASQVWTAFEKVLFSKDGKMVHFKKKGELSSLRGYSQAGKSGGVEIIFRGSYVEWKGLKLPLKLSPDNDYETEMLSKRVKYVRILRNEGKTKPHWYAQLVLEGKPAIKRDPASGAPKHPVGHGAVGIDIGTRTLAYSTDKEVNLLELADRVQNIEQEKRRLQRKMDRSRRATNPENYNPDGTFKRGVKLTRNKSKRYRRIQHQLAMIQHHQADIRKQQHNELANYLLTLGDCFFVENMSYCDLVHRANKTEISEKTGRYKRKKRFGKSIANKAPAMLITMLKQKCQSRGLEGVKEVDTHVRASQYNHQTDTCIEKALENRWNVMPDGERIQRDLYSAFLLQHCKQGLPEYNRKELKKEFGEELYRVFDREALQRDYPQFVAYHHMTIQRLSELPHTIPSMGIRRIIS

SEQ ID NO: 2106 - protein, 512 aa, unidentified
  REGION 1..512: note = Category: MG81 effectors
  REGION 1..512: note = Description: MG81-384 effector
  source 1..512: note = uncultivated organism sequence
MKKRSTDTCCLTLPLKLEKWQEDRLAKRFEIARQLYNTLVHAELKRLVQIKRTAEYLENEQKIRALDRNNPADRAKLQELYKEQRKSLKTAGFTDYSFTTDMGKYYKHFRDNIGSSVAVHGIAPQVWAAFDKLLFKKGGKKVHYKKPGEVNSVQGYSRTGKSGGTEIMFRGPYIERKGLKLPLKLSPDNAYETDMLQRRVKLVRLVRRPGKRRDRWYAQLVLEAKPAIKADPVTGKAVHPIGSGPIGLDIGPQTLAYSAAGAAGLVGLADRVQNIEQEKRRLQRKMDRSRRAANPDNYAEDGTIRRGVKLTHYKSKRYRRSQQELKYLQHRQAEIRKLQHIQFANHLLSLGDHFYVEKMEWSSLTHRAKETVISEKTGKPRSKRRFGKSIANKAPAMLIEILRQKCKSLGLSDVVEINPADIKASQYNHLTGKYVKKSLSRRWNDMQDGEHLQRDLYSAFLLQHYDSCSKTLDHDSIVRDYPAFVQYHHREIERLHALPKTPSSMGIRRSIA

SEQ ID NO: 2107 - protein, 524 aa, unidentified
  REGION 1..524: note = Category: MG81 effectors
  REGION 1..524: note = Description: MG81-385 effector
  source 1..524: note = uncultivated organism sequence
MAKNNNTDTCVLTLPLRVEKWQEDCLLKRFEAARRIYNSLLNFELKKLRQLERTVEYRQIQSVISSAYRSNTKDSLECKDAFKRREKLISANGISENGFKSDVKFFYKYFDGLIGSSVAVHCIAVQLWAAFDKYLSGSGKEIHFKRLGDISSLKGYSVKGKSGGLEIIFRGQYVEWTRKKKKLLLPLKIDPDNEYEREMLSRRVKYVRIIKKPGKNRLRWYAQLTLEGKPALKYSAETGKPIHSVGKGNVGIDIGPQTVAYASDKEVALLELADRVTNIEHQKKKLQRKLDRSRRATNPDNYKPDGTIKRGVKLTRNKSKRYLKLQSKLAYIQHRQAEIRKLQHTCLANHMLTLGDRFFVEKMNWPGLAHRAKETSISEKTGRYKRKKRFGKSLANKAPAMFISILKRKCETLGLPGVVEVDTYNLKASQYNHLSDTYEKKSLSERWNYMPISDGSDSSKTKRIQRDLYSAFLLQHTIPQPCSFDKEALRIDYPNFVTMHDAEIHRLESLPKTITSMGVRRSHS

SEQ ID NO: 2108 - protein, 511 aa, unidentified
  REGION 1..511: note = Category: MG81 effectors
  REGION 1..511: note = Description: MG81-386 effector
  source 1..511: note = uncultivated organism sequence
MAKCSTDTCCLTLPLRLEKWQEDRLAKRFEIARQIYNTMVRAELKKLRAMEQSEPYKANQEKIQALDWKTQADKQALKALYKERDKLLRDGGFSEYGFKSDIKNYYKHFNNNIGSSVAVHGIAPQVWAAFEKMLFKKEGKKVHFKKKGDIHSLRGYSVTGKSGGVEIIFRETYIEWKGLKLPLKLSPDNIYETQMLSYRVKYVRLLRKPGKRKDRWYAQLSLEGKPVIKYNPKTGEVRHPIGKGAVGLDIGPQTLAYSAATGADLVELANQVQNVEQEKRRLQRKLDRSRRATNPGNYADDGTIRRGIALTHNKSKRYLRTQQELKYLQHQQAEIRKRQHTELANHLLSLGDCFYVEKMVWTSLTHRAKETEISEKTGKIKRKKRFGKSVANKAPATLIEILQRKSAALGIPGVIEVPTSVKASQYNHQSGTYTPKPLSQRWNNMPDGERIQRDLYSAFLLQHYDPQTNTFDANSLHQDYPQFVQYHHDAVLRLYAMPKAPSSMGIKRSLR

SEQ ID NO: 2109 - protein, 511 aa, unidentified
  REGION 1..511: note = Category: MG81 effectors
  REGION 1..511: note = Description: MG81-387 effector
  source 1..511: note = uncultivated organism sequence
MREDSQNTCCLTLPLKIEKWQADRLIKRFEIARQIYNTLVHAELKKLQKMEASAEYRKIQDRIRELNPSDVRAKKEWKILKDKQEKLWKAWKITEYGFKSDIKAYYKYFNENIGSAVATHDIAPRVWAAFEKKLNDRTGKVKIQYKKAGDIRSLKGFSVSGKSGGTEIIFHKTYIAWKGLTLPLKLSPDNAYEKEMLMRRIKYVRILRKPGKHKDRWYAQLSLEGNPVVKLDPVSGLPRHPIGKGAVGIDIGPQTLAYSAEGGADLVELADQVQCIEQEKSRLQRKMDRSRRASNPDNYAQDGTIKRGVKLTHNKSRRYCKLQKELAYMLYRQAETRKRQHRELINRLLTMGDCFYIEDMHWNSLAHRAKKTEISEKTGRYKRKKRFGKSIANKAPAMLVDMLEQKCKSLELDVVMVNTSLKASQYNHQTGKYEKKTLSQRWNHMPDGEQIQRDLYSAFLLQHVVPEKNAFDNEALCRDYPKFVQYHHEVIERLRSLPKTISCMGIRRSVS

SEQ ID NO: 2110 - protein, 534 aa, unidentified
  REGION 1..534: note = Category: MG81 effectors
  REGION 1..534: note = Description: MG81-388 effector
  source 1..534: note = uncultivated organism sequence
MGWKSKGRGGTLVKRSSTDTCCLTLPLKLEKWQSDRLEKRFEIGRQIYNTIVHAELKKLRKLERTQQYQEIEQKLENAKQEETKELWKKKRQLLDQNGLSENHFKADMKYYYPHFKDNIASSVAVHGIASQAWTAFEKVLLSKDGKMVHFKKKGELSSLRGYSQAGKSGGIEIIFRGSYVEWKGLKLPLQLSPNNEYETEMLSKRVKYVRILRKDGKTKTHWYAQLALEGKPAVKRDSISGAPKHPVGHGVVGIDIGTRTLAYSTDSEVNLLELADRVQNIEQEKRRLQRKMDRSRRAMNPGNYKPDGSIKQGVKLTWNNSKRYKRIQHQYAMIQHHQADIRKQQHNELANYLLTLGDCFFVENMSYCDLAHRANKTEISEKTGRYKRKKRFGKSIANKAPAMLITMLKQKCQSRGLEGVKEVDTHVCASQYNHQTDTWIKKALENRWNIMPDGERIQRDLYSAFLLQHCRRDLPEYNRKELQKEFGEELYRVFDREALQRDYPQFVAYHHMTIQRLSELPHTIPSMGIRRIIS

SEQ ID NO: 2111 - protein, 538 aa, unidentified
  REGION 1..538: note = Category: MG81 effectors
  REGION 1..538: note = Description: MG81-389 effector
  source 1..538: note = uncultivated organism sequence
MDNEEKEKDGATCCLTLPLKLEKWQSDHLEKRFEIARQLYNTLVHAELKKKCQVERMPEYQEIMKMIDAASNQKEKWALEKKRKAFLEENGFSRNAFKADMEKYYKHFNDNIGANVALHGITAQVWIAFDKVFVDNYKQKGKVHFKKPGELCSVQGYSQKKSGGKEIMFREDRIIWNQQGNRDRKKVKREFLLKLSPDNPYEAEMLKRHVKFVRILRKDGKTKPHWYAQLVLEGKPAVKRDPASGAPKHPIGHGVVGIDIGTRTLAYSTDKEVNLLELADHVQNIEQEKRRLQRKMDRSRRATNPENYNPDGTFKRGVKLTRNKSKRYRRIQHQLAMIQHHQADIRKQQHNELANYLLTLGDCFFVENMSYCDLAHRANKTEISEKKGRYKRKKRFGKSIANKAPAMLITMLKQKCQSRGLEGVKEVDTHVCASQYNHQTDTCIKKALENRWNIMPDGERIQRDLYSAFLLQHCRRDLPEYNRKELQKEFGEELYRVFDREALQRDYPQFVAYHHMTIQRLSELPHTIPSMGIRRIIS

SEQ ID NO: 2112 - protein, 463 aa, unidentified
  REGION 1..463: note = Category: MG81 effectors
  REGION 1..463: note = Description: MG81-390 effector
  source 1..463: note = uncultivated organism sequence
MNNEEKEKDGATCCLTLPLKLEKWQSDHLEKRFEIARQLYNTLVHAELKRIHRIERMPEYREIERQIEATTDKKEKWALKNQKKQFLRKNGINRNTFTTDMKRLYKHFNDNIGSNVAQHGIVSQVLTAFEKVYIENQSGEVHFKKPGDLRSVQGYSQKKSGGVEIMFREGKIIWNQQGNNDRKGVAREFPLKLSPDNSYEAEMLKKHVKFVRILRKDGKTKPHWYAQLVLEGKPAIKRDPASGAPKHPIGHGVVGIDIGTRTLAYSADSKVDLIELADRVQNIEQEKLLLQRKLDRSRRATNPENYKPDGTIKKGVKLTWNNSKRYKRIQHQYAMIQHHQADIRKQQHNELANYLLTLGDCFFVEDMDYRALTRKAKKTEISEKTGRYKRKKRFGKSIANKAPSMLITLLDQKCKSLNLEGVKKVDTAVKASQYNHQTDECKAKELKERWNIMPDGERIQRDL

SEQ ID NO: 2113 - protein, 388 aa, unidentified
  REGION 1..388: note = Category: MG81 effectors
  REGION 1..388: note = Description: MG81-391 effector
  source 1..388: note = uncultivated organism sequence
MVHFKKKGELSSLRGYSQAGKSGGIEIIFRGSYVEWKGLKLPLKLSSNNDYETEMLSKRVKYVRILRQDGKTKPHWYAQLVLEGKPAVKRDPISGAPKHPIGHGAVGIDIGTRTLAYSADSKVDLIELADRVQNIEQEKLLLQRKLDRSRRATNPENYKPDGTIKKGVKLTRNKSKRYRKIQHQLAMLQHRQANIRKRQHNELANYLLTLGDCFFVEDMDYRALTRKAKKTEISEKTGRYKRKKRFGKSIANKAPSMLIALLDQKCKSLNLEGVKKVDTAVKASQYNHQTDECKAKELKERWNIMPDGERIQRDLYSAFLLQHCKRGLPEYNRKKLQEAFGNELYRVFDREALQRDYPKFVEYHRETIQRLSALPKTIASMGIRRIIS

SEQ ID NO: 2114 - protein, 508 aa, unidentified
  REGION 1..508: note = Category: MG81 effectors
  REGION 1..508: note = Description: MG81-392 effector
  source 1..508: note = uncultivated organism sequence
MADKECCVLTLPLQTEIWQEHIIEKRFAIMEHLKNQLIAKELRRLKNLERTKEYRNLIDEINNTPKEKRKALFSKRRKLLKDSGFSEYDFKDDIAGKNSLMQKHFIEHIATQIAHKLASDVWRSFDKFLFGNGRFIHFSKRGSLRSVASQKNGNGMTYKNGYFIWSGGQSKNKIILKIKVTPPKNEYEKEMLSKKIKYLRIVKKWVKTRYKYYLQFALEGKPVKKDRIVNKGNVGIDIGTQTVAISSADSVKILELADKIDKNHTKKKILQRKMDRSRRYTNPQNYNEDGTIKKPPKGQRFSWYKSKKYIQLAGKVRELERKNADIRKYQHTCLANWILSLGDTVYVEQMNFSGLQRRAKETKIDKNGKYAKKKRYGKSLANKAPSMFLTILESKLNQYGGQLNKINTYEFKASQYDHTDDTFTKHNRSERWHILSNGDKNQRDLYSAFLIMNSDISLKHCNREKCNETYSNFKVLQDKEIERLYSDIRKGNCKNISSFGFQRNAKAM

SEQ ID NO: 2115 - protein, 516 aa, unidentified
  REGION 1..516: note = Category: MG81 effectors
  REGION 1..516: note = Description: MG81-393 effector
  source 1..516: note = uncultivated organism sequence
MKKSNTDTCCLTLPLKLEKWQEDRLAKRFEIARQIYNTMVHAELKKLRNIENSQPYRQIQKQIEALNWKNQNDKARLKSLYNDRNKLLNTIGFSEYGFKADIKYYYKHFNDNIGSSVAVHGIAPQVWAAFEKMLFHKEGKKVHYKKKDDIHSLHGYSVTGKSGGVEIIFRKTYIEWKGLKLPLKRSPDNAYETEMLDRRVKYVRLLRKPGKRKDCWYAQLSLKGKPAIKRDPESGKRRHSIGRGAVGLDIGPQTLAYSACGAADLVELADQVQNIEQMKRRLQRKLDRSRRATNPDNYADNGTIRRGVKLTHNKSNRYRRTQRELRYLQHCQAEIRKRQHIELANHLLALGDCFYVEDMAWPSLTHRAKETAISEKTGRIKRKKRFGKSVANKAPATLIGILEQKCNSLGLPGVVKVPTSLRASQYNHQSGEYTSKPLSQRWNNMPDGERIQRDLYSAFLLQHYDPKAGNFDSVLLQQDYPQFVQYHHRAIQRLSTVPKHSPAWEFKEVFDSAKII

SEQ ID NO: 2116 - protein, 508 aa, unidentified
  REGION 1..508: note = Category: MG81 effectors
  REGION 1..508: note = Description: MG81-394 effector
  source 1..508: note = uncultivated organism sequence
MADKECCVLTLPLQTEIWQEHIIEKRFAIMEHLKNQLIAKELRRLKNLERTKEYRNLIDEINNTPKEKRKALFSKRRKLLKDSGFNRNKFKDDMAVMQKHFEEHIATQIAQEAASDVWRSFDKYLFNNGKYIHFTRKGSLSSINCQKINNGMKYIDGYFIWTCGICSGKRDRRIILKIKVTPPKNEYEKEMLSKKIKYLRIVKKWVKTRYKYYLQFALEGKPVKKDRIVNKGNVGIDIGTQTVAISSADSVKILELADKIDKNHTKKKILQRKMDRSRRYTNPQNYNEDGTIKKPPKGQRFSWYKSKKYIQLAGKVRELERKNADIRKYQHTCLANWILSLGDTVYVEQMNFSGLQRRAKETKIDKNGKYAKKKRYGKSLANKAPSMFLTILESKLNQYGGQLNKINTYEFKASQYDHTDDTFTKHNRSERWHILSNGDKNQRDLYSAFLIMNSDISLKHCNREKCNETYSNFKVLQDKEIERLYSDIRKGNCKNISSFGFQRNAKAM

SEQ ID NO: 2117 - protein, 524 aa, unidentified
  REGION 1..524: note = Category: MG81 effectors
  REGION 1..524: note = Description: MG81-395 effector
  source 1..524: note = uncultivated organism sequence
MAKNNNTDTCVLTLPLRVEKWQEDCLLKRFEAARRIYNSLLNFELKKLRQLERTVEYRQIQSVISSAYRSNTKDSPECKDAFKRREKLISANGISEYGFKSDVKFFYKHFDGLIGSSVAVHCIAVQLWAAFDKYLRGSGKEIHFKRLGEISSLKGYSVKGKSGGLEIIFRGQYVEWTRKKKKLLLPLKIDPDNEYEREMLSRRVKYVRIIKKPGKNRLRWYAQLTLEGKPALKYSAETGKPIHSVGKGDVGIDIGPQTVAYASDKEVALLELADRVTNIEHQKKKLQRKLDRSRRATNPDNYKPDGTIKRGVKLTRNKSKRYLKLQSKLAYIQHRQAEIRKLQHTCLANHMLTLGDRFFVEKMNWPGLAHRAKETSISEKTGRYKRKKRFGKSLANKAPAMFISILKRKCETLGLPGVVEVDTFRLKASQYNHLSDTYEKKSLSERWNYMPISDGSDSSKTKRIQRDLYSAFLLQHTIPQPCSFDKEALREDYPNFVTMHDAEIHRLEYLPKTITSMGVRRSHS

SEQ ID NO: 2118 - protein, 511 aa, unidentified
  REGION 1..511: note = Category: MG81 effectors
  REGION 1..511: note = Description: MG81-396 effector
  source 1..511: note = uncultivated organism sequence
MSKRNTTDTCCLTLPLKLEKWQEDRLSKRFEIARQIYNTLVHAELKKLRQVEQSAEYRQIQVQLREMYQNNTTKTKEFRDIANHRRKLLDAAGFREYDFKSAIKDYYKYFKENIGSNVAIHGIAPLVWTAFENKLYKNGKKVHYKRPGDIYSLRGYSVTGKSGGSEIMFRGTYVEWKGLKLPIKRLPDNDYETAMLEYRVKYVRILRKPGKHKNYWYAQLSLEGKPVIKMNPVSNEPVHPIGSGAVGIDIGPQTIAYASQSEAGLLELASQVQNIERQKGLLQRKMERSRRDMNPENYMPDGTFRRGVKLTKNKSKHYCKLQRELAYLQHRQAETRKRQHIELANHLLSLGDCFYVEDMKWLSLTHRAKETEISEKTGRIKRKKRFGKSIANKAPATLIGILDTKCKSLGIPGVVKVPTIIKASQYNHQSDTYEKKPLGQRWNDMPSGERIQRDLYSAFLLQHLEPDLTGYNKKMLAQDYPQFVEYHNHVINDLSMKPKTLASMGIRRRVS

SEQ ID NO: 2119 - protein, 1355 aa, unidentified
  REGION 1..1355: note = Category: MG81 effectors
  REGION 1..1355: note = Description: MG81-397 effector
  source 1..1355: note = uncultivated organism sequence
MKISKIKNSRPGISVAENKNEEPLSRQSLLYYAPVKDGKIRLESKDLEQHVTECNEKAQKLYNVITPEINFYRDENRQKMVENLAKNFNAVINNALRSIRNPKEKKEQRVEKEVAFILNLSKKSIKMKKDVFVKSTDLIVKFPENNKYNKKNDKGTGSKEADIQRIISDLVLRKLKKTLRKEVKLENGYRMQMTEITISLMSAICLYGNAESFDPAILKAFFEKVDSDYTKYKYVEQIVKSIESQSAKLKVIEKDGRHLLISANADHRKKKYVFEFMRMYAAADEKEKRELTEHIQDLIGLYLCGKAGYENAENRFSDMIESHNCICGKIEEILNELEKPENLSQQKKENLKNTTVKVMALKYRAAVNYLADEVGKTVLGEIREKKVRSCADLYWIEYIDSTVEKLLLKSRNKKRYRYEIGFLSKHIWKEWTQYISGKYIEIGKGVYHFAIPDLSGALEGESVSICEVKPEYRNGVSGFDYERIRAEESLEREMEKYVLFAVNNFARAVTPEEEREKSGHEDVLLMKTLSEIEESQTKEERQKKHDNNVKNAITLYADADRRILQFFGGQSRFREKEDSLINLYSGEDLYKEIRKELYAIRNITFHYTTKAEKDQTQKHDLAEYLFEEEFSDITELFREKYYANNVWKYYDAEVINTIMENIYCGRKYRAAQVPAFKNIISRPELPQVMNGFVKGNSLRRLMNCPDRDVINKYWSALFFVLKELYYYDFLQEQKKPEDNVKERFFRAIKKLSGQEKDDEKQKAWESFGNRIDQIGRDRSFGAICQGLMIEYMLQNSDISMVQTETDNGKANNKKQIYKHYRTLLYNCISEAFIEYLREKWKELRTPVLTAKEWSKEEFCRVDGLKHLSLFDHLKETFNDAESGSSWYMAAHFINQKYLNHLLGSIRNYLQFTEDIEDRAISLGDCVDNKREEKNLRYRNTLEILEFVAQFCERTTNVMEDYFESNQEYAEYLSDFVDYNTTKKETDIEKALYSFCKQKFKVDGKEYMAGIYYDGENLIPNRNIIRANMYGNTSCLKPCMDRITLKEIRTMYADQNKLDLVLKEGVCHTEEEQKAYREYQNEKNRIELFDVCTYTQILNDMQARLIGWSYMRERDLMYYQLGYYYTKLFWTDSISEEDARRRLVGNLVNVEDGAILYQILAFNSYNLPIIANKNNTVTLLKDEGSIGGKAITAFFKNYENAEMIYKEALDLFENMDEHAAIINTRNYIEHFKYFIKSDRSMMDLYSEIYDRFFRHDHNRKKNVPDSLKNVLADNFMIVDIDMELGSKKVGEKKKGFREHKAARIEFTDSGIRSTDMTYTIKPDIKDNKKVLVPARSEVFLKQFRKILEYRIQDKTQ

SEQ ID NO: 2120 - protein, 529 aa, unidentified
  REGION 1..529: note = Category: MG81 effectors
  REGION 1..529: note = Description: MG81-398 effector
  source 1..529: note = uncultivated organism sequence
MILLANNNNNNTDTCVLTLPLRVEKWQEDCLLKRFEAARRIYNSLLNFELKKLRQLERTVEYRQIQSVISSAYRSNTKDSPECKDAFKRREKLISANGISEYGFKSDVKFFYKHFDGLIGSSVAVHCIAVQLWAAFDKYLSGSGKEIHFKRLGDISSLKGYSVKGKSGGREIIFRGQYIEWTRKKKKLLLPLKIDPDNEYEREMLSRRVKYVRIIKKPGKNRLRWYAQLTLEGKPALKYSAGTGKPIHSVGKGDVGIDIGPQTVAYASDKEVALLELADRVTNIEHQKKKLQRKLDRSRRATNPDNYKPDGTIKRGVKLTRNKSKRYLKLQSKLAYIQHRQAEIRKLQHTCLANHMLTLGDRFFVEKMNWPGLAHRAKETSISEKTGRYKRKKRFGKSLANKAPAMFISILKRKCETLGLPGVVEVDTYSLKASQYNHLSDTYEKKSLSERWNYMPISDGSDSSKTKRIQRDLYSAFLLQHTIPQPCSFDKEALRIDYPNFVTMHDAEIHRLESLPKTVTSMGVRRSHS

SEQ ID NO: 2121 - protein, 508 aa, unidentified
  REGION 1..508: note = Category: MG81 effectors
  REGION 1..508: note = Description: MG81-399 effector
  source 1..508: note = uncultivated organism sequence
MADKECCVLTLPLQTEIWQEHIIEKRFAIMEHLKNQLIAKELRRLKNLERTKEYRNLIDEINNTPKEKRKALFSKRRKLLKDSGFSEYDFKDDIAGKNSLMQKHFIEHIATQIAHKLASDVWRSFDKFLFGNGRFIHFSKRGSLRSVASQKNGNGMTYKNGYFIWNGGQSKNKIILKIKVTPPKNEYEKEMLSKKIKYLRIVKKWVKTRYKYYLQFALEGKPVKKDRIVNKGNVGIDIGTQTVAISSADSVKILELADKIDKNHTKKKILQRKMDRSRRYTNPQNYNEDGTIKKPPKGQRFSWYKSKKYIQLAGKVRELERKNADIRKYQHTCLANWILSLGDTVYVEQMNFSGLQRRAKETKIDKNGKYAKKKRYGKSLANKAPSMFLTILGSKLNQYGGQLNKINTYEFKASQYDHTDDTFTKHNRSERWHILSNGDKNQRDLYSAFLIMNSDISLKHCNREKCNETYSNFKVLQDKEIERLYSDIRKGNCKNISSFGFQRNAKAM

SEQ ID NO: 2122 - protein, 511 aa, unidentified
  REGION 1..511: note = Category: MG81 effectors
  REGION 1..511: note = Description: MG81-400 effector
  source 1..511: note = uncultivated organism sequence
MGKSSTDTCCLTLPLKLEKWQEDRLAKRFEIARQIYNTMVRAELKKLDRVKQLPEYRKNQKEIQALDWKNSADKQRLKELYGNQRKILQKQGFTEYGFKADSKDYYKHFIENIGSSVATHGIAPQVWNAFDKMLFQKDGKVVHFKRYGDVHSLKGGSVAHKSGGAEIMFRKTYIEWKGLKLPLKLSPDNAYEAEMLSYHVKYVRILRTRGKTKDRWYAQLSLEGKPAVKYDSNTGKPVHPVGKGAVGLDIGPQTLAYVAANEANLVELADQVQNIEQEKRRLQRKLDRSRRATNPDNYNENGTIRRGVKLTHNKSKRYCKLQKELSWIQHCQAETRKRQHIALANHLLSLGDCFYVEPMAWPSLTHRAKKTEVSEETGRIKRKKRFGKSVANKAPASLIGILKLKCISLGLTGVVEVPMLLRASQYNHQSKDYAKKSLSQRWNDMPDGNRIQRDLYSAFLLQHYDSQSESFDQETLERDYPQFVRLHNQTIQRLSALPKTPSSMGIRRSVS

SEQ ID NO: 2123 - protein, 522 aa, unidentified
  REGION 1..522: note = Category: MG81 effectors
  REGION 1..522: note = Description: MG81-401 effector
  source 1..522: note = uncultivated organism sequence
MKRSSTDTCCLTLPLKLEKWQSDRLEKRFEIGRQIYNTIVHAELKKLRKLERTQQYQEIEQKLENAKQEETKELWKKKRQLLDQNGLSENHFKADMKYYYPHFKDNIASSVAVHGIASQAWTAFEKVLLSKDGKMVHFKKKGELSSLRGYSQAGKSGGIEIIFRGSYVEWKGLKLPLQLSPNNEYETEMLSKRVKYVRILRKDGKTKTHWYAQLALEGKPAVKRDSISGAPKHPVGHGVVGIDIGTRTLAYSTDSEVNLLELADRVQNIEQEKRRLQRKMDRSRRAMNPGNYKPDGSIKQGVKLTWNNSKRYKRIQHQYAMIQHHQADIRKQQHNELANYLLTLGDCFFVENMSYCDLAHRANKTEISEKTGRYKRKKRFGKSIANKAPAMLITMLKQKCQSRGLEGVKEVDTHVCASQYNHQTDTCIKKALENRWNVMPDGERIQRDLYSAFLLQHCRRDLPEYNRKELQKEFGEELYRVFDREALQRDYPRFVAYHHMTIQRLSELPHTIPSMGIRRIIS

SEQ ID NO: 2124 - protein, 546 aa, unidentified
  REGION 1..546: note = Category: MG81 effectors
  REGION 1..546: note = Description: MG81-402 effector
  source 1..546: note = uncultivated organism sequence
MGWKSTGRGGKRVKRSSTDTCCLTLPLKLEKWQSDHLEKRFEIARQLYNTLVHAELKKKCQVERMPEYQEIMKMIDAASNQKEKWALEKKRKAFLEENGFSRNAFKADMEKYYKHFNDNIGANVALHGITAQVWIAFDKVFVDNYKQKGKVHFKKPGELCSVQGYSQKKSGGKEIMFREDRIIWNQQGNRDRKKVKREFLLKLSPDNPYEAEMLKRHVKFVRILRKDGKTKPHWYAQLVLEGKPAVKRDPASGAPKHPIGHGVVGIDIGTRTLAYSTDSEVNLLELADRVQNIEQEKRRLQRKMDRSRRAMNPGNYKPDGSIKQGVKLTWNNSKRYKRIQHQYAMIQHHQADIRKQQHNELANYLLTLGDCFFVENMSYCDLAHRANKTEISEKTGRYKRKKRFGKSIANKAPAMLITMLKQKCQSRGLEGVKEVDTHVCASQYNHQTDTCIKKALENRWNIMPDGERIQRDLYSAFLLQHCRRDLPEYNRKELQKEFGEELYRVFDREALQRDYPQFVAYHHMTIQRLSELPHTIASMGIRRSIS

SEQ ID NO: 2125 - protein, 566 aa, unidentified
  REGION 1..566: note = Category: MG81 effectors
  REGION 1..566: note = Description: MG81-403 effector
  source 1..566: note = uncultivated organism sequence
MGWKSKGRGGKRVDNEEKEKDGATCCLTLPLKLEKWQSDHLEKRFEIARQLYNTLVHAELKRIHRIERMPEYREIERQIEATTDKKEKWALKNQKKQFLRKNGINRNTFTTDMKRFYKHFNDNIGSNVAQHGIVSQVLTAFEKVYIENQSGEVHFKKPGDLRSVQGYSQKESGGKEIMFRNGKIIWTQQENDDRKKSPKYQQRKKRQNYKGVKGIAREFPVVFSKNNPYEAEMLTKHVKFVRILRKDGKTKPHWYAQLVLEGKPAVKRDPISSAPKHPVGHGVVGIDIGTRTLAYSTDKEVNLLELADRVQNIEQEKRRLQRKMDRSRRAMNPENYNSDGTFKRGVKLTRNKSKRYRRIQHQLAMIQHHQADIRKQQHNELANYLLTLGDCFFVENMSYCDLVHRANKTEISEKTGRYKRKKRFGKSIANKAPAMLITMLKQKCQSRGLKGVKEVDTHVRASQYNHQTDTCIEKALENRWNIMPDGERIQRDLYSAFLLQHCKQGLPEYNRKELKKEFGEELYRVFDREALQRDYPQFVAYHHMTIQRLSELPHTIPSMGIRRIIS

SEQ ID NO: 2126 - protein, 534 aa, unidentified
  REGION 1..534: note = Category: MG81 effectors
  REGION 1..534: note = Description: MG81-404 effector
  source 1..534: note = uncultivated organism sequence
MGWKSKGRGGKRVKKSSTDTCCLTLPLKLEKWQSDRLEKRFEIGRQIYNTVVRAELKKLHQVERTPQYREIEQKLKEAKQEEAKELWKKRTQLLSKSGFSEYGFKSDMKYYYQHFKENIGSSVAVHGIASQVWTAFEKVLFSKDGKMVHFKKKGELSSLRGYSQAGKSGGIEIIFRGSYVEWKGLKLPLKLSSNNDYETEMLSRRVKYVRILRQDGKTKPHWYAQLVLEGKPAVKRDPISGASKHPIGHGAVGIDIGTRTLAYSADSKVDLIELADRVQNIEQEKLLLQRKLDRSRRATNPENYKPDGTIKKGVKLTRNKSKRYRKIQHQLAMLQHRQANIRKRQHNELANYLLTLGDCFFVEDMDYRALTRKAKKTEISEKTGRYKRKKRFGKSIANKAPSMLIALLDQKCKSLNLEGVKKVDTAVKASQYNHQTDECKAKELKERWNIMPDGERIQRDLYSAFLLQHCKRGLPEYNRKKLQEAFGNELYRVFDREALQRDYPKFVEYHRETIQRLSALPKTIASMGIRRIIS

SEQ ID NO: 2127 - protein, 511 aa, unidentified
  REGION 1..511: note = Category: MG81 effectors
  REGION 1..511: note = Description: MG81-405 effector
  source 1..511: note = uncultivated organism sequence
MKKSNTDTCCLTLPLKLEKWQEDRLAKRFEIARQIYNTMVHAELKKLRNVENSQPYRQIQKQIEALNWKNQNDKARLKSLYNDRNKLLNTIGFSEYGFKADIKYYYKHFNDNIGSSVAVHGIAPQVWAAFEKMLFHKEGKKVHYKKKDDIHSLHGYSVTGKSGGVEIIFRKTYIEWKGLKLPLKRSPNNAYETEMLGRRVKYVRLLRKPGKRKDCWYAQLSLEGKPAIKRDPESGKRRHSIGRGAVGLDIGPQTLAYSACGAADLVELADQVQNIEQMKRRLQRKLDRSRRATNPDNYADNGTIRRGVKLTHNKSNRYRRTQRELRYLQHCQAEIRKRQHIELANHLLALGDCFYVEDMAWPSLTHRAKETAISEKTGRIKRKKRFGKSVANKAPATLIGILEQKCNSLGLPGVMKVPTSLRASQYNHQSGEYTSKPLSQRWNNMPDGERIQRDLYSAFLLQHYDPKAGNFDSALLQQDYPQFVQYHHRAIQRLSTVPKTLSSMGIQRSLR

SEQ ID NO: 2128 - protein, 538 aa, unidentified
  REGION 1..538: note = Category: MG81 effectors
  REGION 1..538: note = Description: MG81-406 effector
  source 1..538: note = uncultivated organism sequence
MNNEEKEKEGATCCLTLPLKLEKWQSDHLEKRFEIARQLYNTLVHAELKKKCQVERMPEYQEIMKMIDTASNQKEKWALEKKRKAFLEENGFSRNAFKADMEKYYKHFNDNIGANVALHGITAQVWIAFDKVFVDNYKQKGKVHFKKPGELCSVQGYSQKKSGGKEIMFREDRIIWNQQGNRDRKKVKREFLLKLSPDNPYEAEMLKRHVKFVRILRKDGKTKPHWYAQLVLEGKPAVKRDPASGAPKHPIGHGVVGIDIGTRTLAYSTDKEVNLLELADRVQNIEQEKRRLQRKMDRSRRAMNPENYNSDGTFKRGVKLTRNKSKRYRRIQHQLAMIQHHQADIRKQQHNELANYLLTLGDCFFVENMSYCDLVHRANKTEISEKTGRYKRKKRFGKSIANKAPAMLITMLKQKCQSRGLEGVKEVDTHVRASQYNHQTDTCIEKALENRWNVMPDGERIQRDLYSAFLLQHCKQGLPEYNRKELKKEFGEELYRVFDREALQRDYPQFVAYHHMTIQRLSELPHTIASMGIRRSIS

SEQ ID NO: 2129 - protein, 336 aa, unidentified
  REGION 1..336: note = Category: MG81 effectors
  REGION 1..336: note = Description: MG81-407 effector
  source 1..336: note = uncultivated organism sequence
MAKCSTDTCCLTLPLRLEKWQEDRLAKRFEIARQIYNTMVRAELKKLRAMEQSEPYKANQEKIQALDWKTQTDKQALKALYKERDKLLRDGGFSEYGFKSDIKNYYKHFNNNIGSNVAFHGIAPQVWAAFEKMLFKKEGKKVHFKKKGDIHSLRGYSAAGKSGGVEIIFRETYIEWKGLKLPLKLSPDNIYETQMLSYRVKYVRLLRKPGKRKDRWYAQLSLEGKPVIKYNPKTGEVRHPIGKGAVGLDIGPQTLAYSAATGADLVELANQVQNVEQEKRRLQRKLDRSRRATNPGNYADDGTIRRGIALTHNKSKRYLRTQQELKYLQHQPASAS

SEQ ID NO: 2130 - protein, 522 aa, unidentified
  REGION 1..522: note = Category: MG81 effectors
  REGION 1..522: note = Description: MG81-408 effector
  source 1..522: note = uncultivated organism sequence
MKKSSTDTCCLTLPLKLEKWQSDRLEKRFEIGRQIYNTVVRAELKKLHQLERTPQYREIEQKLKEAKQEEAKELWKKRTQLLSQSGFSEYGFKSDMKYYYQHFKENIGSSVAVHGIASQVWTAFEKVLFSKDGKMVHFKKKGELSSLRGYSQAGKSGGVEIIFRGSYVEWKGLKLPLKLSPNNDYETEMLSKRVKYVRILRQEGKTKPHWYAQLVLEGKPAIKRDPASGAPKHPVGHGVVGLDIGTRTLAYSADDKVDLLELADRVQNIEQEKMLLQRKLDRSRRATNPENYKPDGTIKKGVKLTRNKSKRYRKIQHQLAMLQHRQADIRKRQHNELANYLLTLGDCFFVEDMDYRALTRKAKKTEISEKTGRYKRKKRFGKSIANKAPSMLIALLDQKCKSLNLEGVKKVDTAVKASQYNHQTDECKAKELKERWNIMPDGERIQRDLYSAFLLQHCKRGLPEYNRKELQKEFGEELYRVFDREALQRDYPQFVVYHHMTIQRLSALPKTIASMGIRRIIS

SEQ ID NO: 2131 - protein, 538 aa, unidentified
  REGION 1..538: note = Category: MG81 effectors
  REGION 1..538: note = Description: MG81-409 effector
  source 1..538: note = uncultivated organism sequence
MDNEGKEKDGATCCLTLPLKLEKWQSDHLEKRFEIARQLYNTLVHAELKKKCQVERMPEYQEIMKMIDAASNQKEKWALEKKRKAFLEENGFSRNAFKADMEKYYKHFNDNIGANVALHGITAQVWIAFDKVFVDNYKQKGKVHFKKPGELCSVQGYSQKKSGGKEIMFREDRIIWNQQGNRDRKKVKREFLLKLSPDNPYEAEMLKRHVKFVRILRKDGKTKPHWYAQLVLEGKPAVKRDPISGAPKHPVGHGVVGIDIGTRTLAYSTDKEVNLLELADRVQNIEQEKRRLQRKMDRSRRATNPENYNSDGTFKRGVKLTRNKSKRYRRIQHQLAMIQHHQADIRKQQHNELANYLLTLGDCFFVENMSYCDLVHRANKTEISEKTGRYKRKKRFGKSIANKAPAMLITMLKQKCQSRGLEGVKEVDTHVRASQYNHQTDTCIEKALENRWNIMPDGERIQRDLYSAFLLQHCKQGLLEYNRKELKKEFGEELYRVFDREALQRDYPQFVAYHHMTIQRLSELPHTIPSMGIRRIIS

SEQ ID NO: 2132 - protein, 554 aa, unidentified
  REGION 1..554: note = Category: MG81 effectors
  REGION 1..554: note = Description: MG81-410 effector
  source 1..554: note = uncultivated organism sequence
MNNEEKEKDGATCCLTLPLKLEKWQSDHLEKRFEIARQLYNTLVHAELKRIHRIERMPEYREIERLIEATTDKKEKWALKNQKKQFLRKNGINRNTFTTDMKRLYKHFNDNIGSNVAQHGIVSQVLTAFEKVYIENQSGEVHFKKPGDLRSVQGYSQKKSGGKEIMFRNGKIIWTQQENDDRKKSPKYQQRKKRQNYKGVKGIAREFPVVFSKNNPYEAEMLTKHVKFVRILRKDGKTKPHWYAQLVLEGTPVAKYDPISGAPKHPVGHGAVGIDIGTRTLAYSADSKVDLIELADRVQNIEQEKLLLQRKLDRSRRATNPGNYNPDGTIKCGVKLTRNKSKRYRKIQHQLAMLQHRQADIRKRQHNELANYLLTLGDCFFVEDMDYRALTRKAKKTEISEKTGRYKRKKRFGKSIANKAPSMLIALLDQKCKSLNLEGVKKVDTAVKASQYNHQTDECKAKELKERWNIMPDGERIQRDLYSAFLLQHCKRGLPEYNRKKLQETFGNELYRVFDREALQRDYPKFVEYHRKTIQRLSALPKTIASMGIRRIIS

SEQ ID NO: 2133 - protein, 522 aa, unidentified
  REGION 1..522: note = Category: MG81 effectors
  REGION 1..522: note = Description: MG81-411 effector
  source 1..522: note = uncultivated organism sequence
MKRSSTDTCCLTLPLKLEKWQSDRLEKRFEIGRQIYNTVVRAELKKLQQVERTPQYREIEQKLKGAKQEEAKELWKKRTQLLSKSGFSEYGFKSDMKYYYQHFKENIGSSVAVHGIASQVWTAFEKVLFSKDGKMVHFKKKGELSSLRGYSQAGKSGGVEIIFRGSYVEWKGLKLPLKLSPDNDYETEMLSKRVKYVRILRQDGKTKPHWYAQLVLEGKPAIKRDPASGAPKHPVGHGVVGIDIGTRTLAYSADSKVDLIELADRVQNIEQEKLLLQRKLDRSRRATNPENYKPDGTIKKGVKLTWNNSKRYKRIQHQYAMIQHHQADIRKQQHNELANYLLTLGDCFFVEDMDYRALTRKAKKTEISEKTGRYKRKKRFGKSIANKAPSMLIALLDQKCKSLNLEGVKKVDTAVKASQYNHQTDECKAKELKERWNIMPDGERIQRDLYSAFLLQHCRRDLPEYNRKKLQETFGNELYRIFDREALQRDYPKFVEYHRETIQRLSALPKTIASMGIRRSIS

SEQ ID NO: 2134 - protein, 511 aa, unidentified
  REGION 1..511: note = Category: MG81 effectors
  REGION 1..511: note = Description: MG81-412 effector
  source 1..511: note = uncultivated organism sequence
MGKSKTETCCLTLPLKLEKWQEDRLAKRFEIARQIYNTLVHAELKKLNQIERSSEYQTIQDQITNLDRNDPERIKELPSLYKKRTKLLRDAGFTEYGFKSDVKHYYKYFHKNIGSSVAVHGIAPQVWAAFEKKLFKKQGKIVHYKRKGTLRSVKGGSATGKSGGTEIIFRGTYIQWKDLNLPLKRSPDNAYESEMLGYRVKYVRILRKPGKSKNRWYAQLVLEGKPVIKRNPMTGAALHPVGHGAVGLDIGPQTLAYSAADGVGLLELADQVQNIERQKALLQRKLDRSRRASNPDNYNEDGTIKRGVKLTRNQSKRYCKTQRDLAYLQHCQAETRKRQHIALANHLLTLGDRFYVEQMSWVALARRSKKTEVSEKTGKIKRKKRFGKSIANKAPAMLIEILRQKCISLGLPGVVDVPTSIKASQYNHQSKDYIKKNLSERWNDMPDGEKIQRDLYSAFLLQHCTPELNAFDQESLQQDYPRFVQYHHQVMQQLSEMPKTPSSMGIRRRTS

SEQ ID NO: 2135 - protein, 534 aa, unidentified
  REGION 1..534: note = Category: MG81 effectors
  REGION 1..534: note = Description: MG81-413 effector
  source 1..534: note = uncultivated organism sequence
MGWKSKGRGGTLVKKSSTDTCCLTLPLKLEKWQSDRLEKRFEIGRQIYNTVVRAELKKLQQVERTPQYREIEQKLKEAKQEEAKELWKTRTQLLSKSGFSEYGFKSDMKYYYQHFKENIGSSVAVHGIASQVWTAFEKVLFSKDGKMVHFKKKGELSSLRGYSQAGKSGGIEIIFRGSYVEWKGLKLPLKLSPDNDYETEMLSKRVKYVRILRKEGKTKPHWYAQLVLEGKPAIKRDPASGAPKHPVGHGVVGIDIGTRTLAYSADSKVDLIELADRVQNIEQEKMLLQRKLDRSRRATNPENYKPDGTIKKGVKLTRNKSKRYRKIQHQLAMLQHRQADIRKRQHNELANYLLTLGDCFFVEDMDYRALTRKAKKTEISEKTGRYKRKKRFGKSIANKAPSMLIALLDQKCKSLNLEGVKKVDTAVKASQYNHQTDECKAKELKERWNIMPDGERIQRDLYSAFLLQHCRRDLPEYNRKKLQEAFGNELYRVFDREALQRDYPKFVEYHRKTIQRLSALPKTIASMGIRRSIS

SEQ ID NO: 2136 - protein, 508 aa, unidentified
  REGION 1..508: note = Category: MG81 effectors
  REGION 1..508: note = Description: MG81-414 effector
  source 1..508: note = uncultivated organism sequence
MADKECCVLTLPLQTENWQEHIIEKRFAIMEHLKNQLIAKELRRLKNLERTKEYRILIDEINNTPKEKRKALFSKRRKLLKDSGFNRNKFKDDMAVMQKHFEEHIATQIAQEAASDVWRSFDKYLFNNGKYIHFTRKGSLSSINCQKINNGMKYIDGYFIWTCGICSGKRDRRIILKIKVTPPKNEYEKEMLSKKIKYLRIVKKWVKTRYKYYLQFALEGKPVKKDRIVNKGNAGIDIGTQTVAISSADSVKLLELADKIDKNHTKKKILQRKMDRSRRYTNPQNYNEDGTIKKPPKGQRYCWYKSKKYIQLAGKVRELERKNADIRKYQHTCLANWILSLGDTVYVEQMNFSGLQRRAKETKIDKNGKYAKKKRYGKSLANKAPSMFLTILESKLNQYGGQLNKINTYEFKASQYDHTDDTFTKHNRSERWHILSNGDKNQRDLYSAFLIMNSDISLEHCNREKCNETYSNFKVLQDKEIERLYSDIRKGNCKNISSFGFQRNAKAM

SEQ ID NO: 2137 - protein, 508 aa, unidentified
  REGION 1..508: note = Category: MG81 effectors
  REGION 1..508: note = Description: MG81-415 effector
  source 1..508: note = uncultivated organism sequence
MADKECCVLTLPLQTEIWQEHIIEKRFAIMEHLKNQLIAKELRRLKNLERTKEYRNLIDEINNTPKEKRKALFSKRRKLLKDNGFNRNKFKDDMAVMQKHFEEHIATQIAQEAASDVWRSFDKYLFNNGKYIHFTRKGSLSSINCQKINNGMKYIDGYFIWTCGICSGKRDRRIILKIKVTPPKNEYEKEMLSKKIKYLRIVKKWVKTRYKYYLQFALEGKPVKKDRIVNKGNVGIDIGTQTVAISSADSVKILELADKIDKNHTKKKILQRKMDRSRRYTNPQNYNEDGTIKKPPKGQRFSWYKSKKYIQLAGKVRELERKNADIRKYQHTCLANWILSLGDTVYVEQMNFSGLQRRAKETKIDKNGKYAKKKRYGKSLANKAPSMFLNILESKLNQYGGQLNKINTYEFKASQYDHTDDTFTKHNRSERWHILSNGDKNQRDLYSAFLIMNSDISLKHCNREKCNETYSNFKVLQDKEIERLYSDIRKGNCKNISSFGFQRNAKAM

SEQ ID NO: 2138 - protein, 511 aa, unidentified
  REGION 1..511: note = Category: MG81 effectors
  REGION 1..511: note = Description: MG81-416 effector
  source 1..511: note = uncultivated organism sequence
MLVSKRSTTDTCCLTLPLRLEKWQADRLAKRFEIARQIYNTLVRAELKKLVRLERISAYKDIQQQLYSLYRDGHQNSREYKVLFQKRRSLLTEAGIREYGFKSDIAKYYKHFHENIGSSVAVHCIASQVWCAFDKYLFHNGKQVHFKRAGDIRSLKGYSVSGKSGGTEIIYRGTFIEWKGLRLPLKLDPDNRYEAEMLTKRVKYVRLLRTRGNHQDRWYAQLVLEGTPAVKHDAKTNALRHPIGHGAVGIDIGPQTIAYVAQDEAALMELANRVQNIEREKLLIQRKMDRSRRATNPDNYAVDGTIKRGVKLTRNKSKRYCTLQHRLAFIQSRQALIRKVQHTELANHLLSLGDRFYVENMEWSSLTHRASETAISEKTGRYKRKKRFGKSISNKAPATLIGILEQKCKSLGLPGVIKVPTKLCASQYNHMTDTREKKPLSQRWNDMPDGHRIQRDLYSAFLLQHVTPQEDGFDRPSLQRDYEKFVSLHDEVIRQLTLAPKTLSSMGIRRT

SEQ ID NO: 2139 - protein, 1358 aa, unidentified
  REGION 1..1358: note = Category: MG81 effectors
  REGION 1..1358: note = Description: MG81-417 effector
  source 1..1358: note = uncultivated organism sequence
MKISKIKNSRPGISVAENKNEESLSRQSLLYYAPVKDGKIRLESKDLEQHVTECNEKAQKLYNVITPEINFYRDENRQKMVENLARNFNAVINNALRSIRNPKEKKEQRVEKEVAFILNLSKKSIKMKKDVFVKSTDLIVKFPENNKYNKKNDKGTGSKEAYIQKMISDLVLRKLKNTLRKEVKLENGYRMQMTEIIISLMSAICLYGNAESFDPAILKAFFEKVDSDYTKYKYVEQIVKSIESQSAKLKVVEKDGRHLLISANADHRKKKYVFEFMRMYAAADEKEKRELTEHIQDLIGLYLCGKAGYENAENRFSDMTESHNCICGKIEEILNELEKPENLSQKKKENLKNTTVKVMALKYRAAVNYLADEVGKTVLGEIREKKVRSCADLYWIEYIDSTVEKLLLKSRNKDGYRYEIGFLSKHIWKEWTQYISGKYIEMGKGVYHFAIPDLSGNLEGEPISICEVKPEYRNGVSGFDYERIRAEESLEREMEKYVLFAVNNFARAVTPEEEREKSGHEDVLLMKTLSEIEESQTKEERQKKHDNNVKNAITLYADADRRILQFFGGQSRFREKEDSLINLYSGEDLYKEIRKELYAIRNITFHYTTKADKDQTQKHDLAEYLFEEEFSDITELFREKYYANNVWKYYDVEVINTIMENIYCGRKYRAAQVPAFKNIISRPELPQVMNGFVKGNSLRRLMNCPDRDVINKYWSALFFVLKELYYYDFLQEQKKPEDNVKERFFRAIEKLSGQENDDKKQKAWESFGNRIDQIGRDRSFGAICQGLMIEYMLQNSDISMVQTETDNGKANNKKQIYKHYRTLLYNCIREAFIEYLREKWEELRTPVLTVKEWSKEEFCRADGLKHLSLFDHLKKTFNDAESGSSWYMAAHFINQKYLNHLLGSIRNYLQFTEDIEDRAISLGDCVDNKREEKNLRYRNTLEILEFVAQFCERTTNVMEDYFESNQEYAEYLSGFVDYNTTKKETDIEKALYSFCKQKFKVDGKEYMAGIYYDGENLIPNRNIIRANMYGNTSCLKPCMDRITLKEIRTMYADQNKLDLVLKEGVCHTEEEQKAYREYQNEKNRIELFDVCTYTQILNDMQARLIGWSYMRERDLMYYQLGYYYTKLFWTDSISEEDARRRLVGNLVNVEDGAILYQILAFNSYNLPIIANKNNTVTLLKDEGSIGGKAITAFFKNYENAEMIYEEALDLFENMDEHAAIINTRNYIEHFKYFIKSDRSMMDLYSEIYDRFFRHDHNRKKNVPDSLKNVLADNFMIVDIDMELGSKKVGEKKKGFREHKAARIEFTDSGIRSTDMTYTIKPDIKDNKKDKKVLVPARSEVFLKQFRKILEYRIQDKIQ

SEQ ID NO: 2140 - protein, 530 aa, unidentified
  REGION 1..530: note = Category: MG81 effectors
  REGION 1..530: note = Description: MG81-418 effector
  source 1..530: note = uncultivated organism sequence
MILLAKNNNNNNTDTCVLTLPLRVEKWQEDCLLKRFEAARRIYNSLLNFELKKLRQLERTVEYRQIQSVISSAYRSNTKDSPECKDAFKRREKLISANGISENGFKSDVKFFYKHFDGLIGSNVAVHCIAVQLWAAFDKYLSGSGKEIHFKRLGDISSLKGYSVKGKSGGCEIIFRGQYVEWTRKKKKLLLPLKIDPDNEYEREMLSRRVKYVRIIKKPGKNRLRWYAQLTLEGKPALKYSAGTGKPIHSVGKGNVGIDIGPQTVAYASDKEVALLELADRVTNIEHQKKKLQRKLDRSRRATNPDNYKPDGTIKRGVKLTRNKSKRYLKLQSKLAYIQHRQAEIRKLQHTCLANHMLTLGDRFFVEKMNWPGLAHRAKETSISEKTGRYKRKKRFGKSLANKAPAMFISILKRKCETLGLPGVVEVDTYSLRASQYNHLSDTYEKKSLSERWNYMPISDGSDSSKTKRIQRDLYSAFLLQHTIPQPCSFDKKALRIDYPNFVTMHDAEIHRLESLPKTITSMGVRRSHS

SEQ ID NO: 2141 - protein, 322 aa, unidentified
  REGION 1..322: note = Category: MG81 effectors
  REGION 1..322: note = Description: MG81-419 effector
  source 1..322: note = uncultivated organism sequence
MCNEINMISWQKFQRPMSGFDLGYSAKGMSKMMAIPQRSIGCICTEYATRTKQFKKRKLNWRSYKKNTGWIPFATQQMKCFSDGIFFNGQKFKLWDYKPFDEKTIKSGSFQQDARGRWYVSITVEIEASSEIPKTGKAVGIDLGLKSLVTLSDGTVYDRVNLTEMYAKKLATAQLAGNLMQVRNIHAKIKNTRKNFYHEISLAIVKNYDEIYIGNISSSKLIKTKMAKSVSDAAWYDFKFMLKYKAERAGKKFVEVNESFSTVTCSSCLERTGPSGLSALGVRSWICSHCGAAHDRDVNAAKNILRSGQCADLRVKGSSLKN

SEQ ID NO: 2142 - protein, 384 aa, unidentified
  REGION 1..384: note = Category: MG81 effectors
  REGION 1..384: note = Description: MG81-420 effector
  source 1..384: note = uncultivated organism sequence
MVHFKKKGELSSLRGYSQTGKSGGIEIIFRGSYVEWKGLKLPLKLSPDNDYETEMLSKRVKYVRILRQDGKTKPHWYAQLVLEGKPAVKRDPISGAPKHPIGRGVVGIDIGTRTLAYSADSKVDLIELADRVQNIEQEKLLLQRKLDRSRRATNPENYKPDGTIKKGVKLTRNKSKRYRRIQHQLAMIQHHQADIRKQQHNELANYLLTLGDCFFVEDMDYRALTRKAKKTEISEKTGRYKRKKRFGKSIANKAPSMLIALLDQKCKSLNLEGVKKVDTAVKASQYNHQTDECKAKELKERWNIMPDGERIQRDLYSAFLLQHCRRDLPEYNRKKLQETFGNELYRVFDREALQRDYPKFVEYHRETIQRLSALPKTIASMGIS

SEQ ID NO: 2143 - protein, 538 aa, unidentified
  REGION 1..538: note = Category: MG81 effectors
  REGION 1..538: note = Description: MG81-421 effector
  source 1..538: note = uncultivated organism sequence
MDNEEKEKDGATCCLTLPLKLEKWQSDHLEKRFEIARQLYNTLVHAELKKKCQVERMPEYQEIMKMIDAASNQKEKWALEKKRKAFLEENGFSRNAFKADMEKYYKHFNDNIGANVALHGITAQVWIAFDKVFVDNYKQKGKVHFKKPGELCSVQGYSQKKSGGKEIMFREDRIIWNQQGNRDRKKVKREFLLKLSPDNPYEAEMLKRHVKFVRILRKDGKTKPHWYAQLVLEGKPAVKRDPASGAPKHPIGHGVVGIDIGTRTLAYSTDKEVNLLELADRVQNIEQEKRRLQRKMDRSRRAMNPGNYKPDGSIKQGVKLTWNNSKRYKRIQHQYAMIQHHQADIRKQQHNELANYLLTLGDCFFVENMSYCDLAHRANKTEISEKTGRYKRKKRFGKSIANKAPAMLITMLKQKCQSRGLEGVKEVDTHVCASQYNHQTDTCIKKALENRWNIMPDGERIQRDLYSAFLLQHCRRDLPEYNRKELQKEFGEELYRVFDREALQRDYPQFVAYHHMTIQRLSELPHTIPSMGIRRIIS

SEQ ID NO: 2144 - protein, 495 aa, unidentified
  REGION 1..495: note = Category: MG81 effectors
  REGION 1..495: note = Description: MG81-422 effector
  source 1..495: note = uncultivated organism sequence
MPNTDSNRCILTLPLMTEPWQEHLIETRFDIMEHLKNSLIALELRKLKNLQRTRAYKELEKKIFEKPKEERKPLYKERSAMLRTAGFSEFDFINDMTPMQKHFADHIAAQISHRSASDVWRAFESYLFSSGREVHFQKRGTLDSVACKKAGNGMNYRNDTFEWSGGRTPNAKRLCIRVENPQTEYEKHMLEKEVKNMRIIRKWMKTRYKYYLQLTLVGDPYQKPRKIGEGRVGIDIGTRTIAIASETTVRLLELADRIDGNHKRKCELQRKMDASKRATNPDNFNSDGTIRRRSKGKKMTWHFSKHYLRMRDQVRELERKNADIRTYQHNCLANEVLTLGTDVFVEPMSYKGLQHRAKETKVDEKGRYLKKKRFGKSLANKAPSKFLMILENKLACKGKALNYVDINRFRASQFDHTNGTYRKKQLSERFATLSTGEHVQRDMYSAFLLMNSNDSLNAPDIERCGQTFERFKELHAIEVERIRQSPYRRIQSFGI

SEQ ID NO: 2145 - protein, 508 aa, unidentified
  REGION 1..508: note = Category: MG81 effectors
  REGION 1..508: note = Description: MG81-423 effector
  source 1..508: note = uncultivated organism sequence
MADKECCVLTLPLQTEIWQEHIIEKRFAIMEHLKNQLIAKELRRLKNLERTKEYRNLIDEINNTPKEKRKALFSKRRKLLKDSGFSEYDFKDDIAGKNSLMQKHFIEHIATQIAHKLASDVWRSFDKFLFGNGRFIHFSKRGSLRSVASQKNGNGMTYKNGYFIWSGGQSKNKIILKIKVTPPKNEYEKEMLSKKIKYLRIVKKWVKTRYKYYLQFALEGKPVKKDRIVNKGNVGIDIGTQTVAISSADSVKLLELADKIDKNHTKKKILQRKMDRSRRYTNPQNYNEDGTIKKPPKGQRFSWYKSKKYIQLAGKVRELERKNADIRKYQHTCLANWILSLGDTVYVEQMNFSGLQRRAKETKIDKNGKYAKKKRYGKSLANKAPSMFLTILESKLNQYGGQLNKINTYEFKASQYDHTDDTFTKHNRSERWHILSNGDKNQRDLYSAFLIMNSDISLEHCNREKCNETYSNFKVLQDKEIERLYSDIRKGNCKNISSFGFQRNAKAM

SEQ ID NO: 2146 - protein, 528 aa, unidentified
  REGION 1..528: note = Category: MG81 effectors
  REGION 1..528: note = Description: MG81-424 effector
  source 1..528: note = uncultivated organism sequence
MILLTKNNNNTDTCVLTLPLRVEKWQEDCLLKRFEAARRIYNSLLNFELKKLRQLERTVEYRQIQSVISSAYRSNTKDSPECKDAFKRREKLISANGISENGFKSDVKFFYKHFDGLIGSNVAVHCIAVQLWAAFDKYLSGSGKEIHFKRLGDISSLKGYSVKGKSGGCEIIFRGQYVEWTRKKKKLLLPLKIDPDNEYEREMLSRRVKYVRIIKKPGKNRLRWYAQLTLEGKPALKYSAETGKPIHSVGKGNVGIDIGPQTVAYASDKEVALLELADRVTNIEHQKKKLQRKLDRSRRATNPDNYKPDGTIKRGVKLTRNKSKRYLKLQSKLAYIQHRQAEIRKLQHTCLANHMLTLGDRFFVEKMNWPGLAHRAKETSISEKTGRYKRKKRFGKSLANKAPAMFISILKRKCETLGLPGVVEVDTYSLKASQYNHLSDTYEKKSLSERWNYMPISDGSDSSKTKRIQRDLYSAFLLQHTIPQPCSFDKEALRIDYPNFVTMHDAEIHRLESLPKTVTSMGVRRSHS

SEQ ID NO: 2147 - protein, 317 aa, unidentified
  REGION 1..317: note = Category: MG81 effectors
  REGION 1..317: note = Description: MG81-425 effector
  source 1..317: note = uncultivated organism sequence
MLSYRVKYVRLLRKPGKRKDRWYAQLSLEGKPVIKYNPKTGEVRHPIGKGAVGLDIGPQTLAYSAATGADLVELANQVQNVEQEKRRLQRKLDRSRRATNPGNYADDGTIRRGIALTHNKSKRYLRTQQELKYLQHQQAEIRKRQHTELANHLLSLGDCFYVEKMVWTSLTHRAKETEISEKTGKIKRKKRFGKSVANKAPATLIGILQRKSAALGIPGVIEVPTSVKASQYNHQSGTYTPKPLSQRWNNMPDGERIQRDLYSAFLLQHYDPQTNTFDANSLHQDYPQFVQYHHDAVLRLYAMPKTPSSMGIKRSLR

SEQ ID NO: 2148 - protein, 475 aa, unidentified
  REGION 1..475: note = Category: MG81 effectors
  REGION 1..475: note = Description: MG81-426 effector
  source 1..475: note = uncultivated organism sequence
MKMIDAASNQKEKWALEKKRKAFLEENGFSRNAFKADMEKYYKHFNDNIGANVALHGITAQVWIAFDKVFVDNYKQKGKVHFKKPGELCSVQGYSQKKSGGKEIMFREDRIIWNQQGNRDRKKVKREFLLKLSPDNPYEAEMLKRHVKFVRILRKDGKTKPHWYAQLVLEGKPAVKRDPASGAPKHPVGHGVVGIDIGTRTLAYSTDSEVNLLELADRVQNIEQEKRRLQRKMDRSRRAMNPGNYKPDGSIKQGVKLTWNNSKRYKRIQHQYAMIQHHQADIRKQQHNELANYLLTLGDCFFVENMSYCDLVHRANKTEISEKTGRYKRKKRFGKSIANKAPAMLITMLKQKCQSRGLKGVKEVDTHVRASQYNHQTDTCIEKALENRWNVMPDGERIQRDLYSAFLLQHCKQGLPEYNRKELKKEFGEELYRVFDREALQRDYPQFVAYHHMTIQRLSELPHTIPSMGIRRSIS

SEQ ID NO: 2149 - protein, 526 aa, unidentified
  REGION 1..526: note = Category: MG81 effectors
  REGION 1..526: note = Description: MG81-427 effector
  source 1..526: note = uncultivated organism sequence
MAKNNNNNTDTCVLTLPLRVEKWQEDCLLKRFEAARRIYNSLLNFELKKLRQLERTVEYRQIQSVISSAYRSNTKDSPECKDAFKRREKLISANGISEYGFKSDVKFFYKHFDGLIGSSVAVHCIAVQLWAAFDKYLRGSGKEIHFKRLGEISSLKGYSVKGKSGGLEIIFRGQYVEWTRKKKKLLLPLKIDPDNEYEREMLSRRVKYVRIIKKPGKNRLRWYAQLTLEGKPALKYSAETGKPIHSVGKGNVGIDIGPQTVAYASDKEVALLELADRVTNIEHQKKKLQRKLDRSRRATSPDNYKPDGTIKRGVKLTRNKSKRYLKLQSKLAYIQHRQAEIRKLQHTCLANHMLTLGDRFFVEKMNWPGLAHRAKETSISEKTGRYKRKKRFGKSLANKAPAMFISILKRKCETLGLLGVVEVDTFRLRASQYNHLSDTYEKKSLSERWNYMPISDGSDRSKTKRIQRDLYSAFLLQHTIPQSCSFDKEALRIDYPNFVTMHDAEIHRLESLPKTITSMGVRRSHS

SEQ ID NO: 2150 - protein, 386 aa, unidentified
  REGION 1..386: note = Category: MG81 effectors
  REGION 1..386: note = Description: MG81-428 effector
  source 1..386: note = uncultivated organism sequence
MALRRRSGPFKKEGKKVHFKKTGDIRSLRGYSVTGKSGGVEIIFRGSYIEWKGLNLPLKLSPDNAYETEMLSYRVKYVRILRKPGKTRDRWYAQLSLEGKPAIKRNPASGNPVHPVGQGAVGLDIGPQTLAYAAEKEANLVELADRVQNIEREKHLLQRKMDRSRRAANPDNYAENGTIRRGVKLTHNKSKRYLRLQRELCYLQHCQAETRKRQHTELANHLLSLGSCFYVEDMAWPSLTHRAKKTEISDKTGRIKRKKRFGKSIANKAPAALINILRTKCVSLGIPGVVEVPTSLKASQYNHQSKEYTPKPLSQRWNDMPDGSRIQRDLYSAFLLQHYDPQSGNFDQASLEADYPQFVQLHNQSIQRLLTVPKTPSSMGIRRSVS

SEQ ID NO: 2151 - protein, 542 aa, unidentified
  REGION 1..542: note = Category: MG81 effectors
  REGION 1..542: note = Description: MG81-429 effector
  source 1..542: note = uncultivated organism sequence
MATTDKKDKDKEKLRAYKFRLDPNQAQTIALYQAAGAARYTYNMLTAYNLEVNRLRDDYWKKRHDEGISDADIKKELNALTKEDKRYKQLKYGAFGTQYLTPEKKRHEQAEHRIENGEDPSVVWNQETERSANPWLHTANQRVLVSGLKNASDAWDNFWASRTGKRAGRLVGTPRFKKKGVSRDSFTVPAPEKMGAYGTAYLRGEPAYKQGRRKITDYRHVRLSYLGTIRTFNSTKPLVKAVAAGAKIRRYTVSRNADRWYVSFLVKFSEPIRRSATKRARAAGSVGVDLGVKYLASLSDSEAPQRFPNLKFVEGLPSLENPRWSEASSRRLHKLQRALARSQKGSNRRSRLVKQIARLHHMTALRRESNLHQLTKKLATEYTLVGFEDLNVSGMTASAKGTVENPGKNVAQKSGLNRVVLDAAFGVFRNQLEYKAVWYGSAFEKVDRYFASSQTCSECGRKAKTKLTLRDRVFDCAYCGNMMDRDLNAAVNICREAQRLFDEKLASEDGESLNGRGSRGALRGAETVEASRPPASHRRGSP

SEQ ID NO: 2152 - protein, 527 aa, unidentified
  REGION 1..527: note = Category: MG81 effectors
  REGION 1..527: note = Description: MG81-430 effector
  source 1..527: note = uncultivated organism sequence
MAKNNNNNDTDTCVLTLPLRVEKWQEDCLLKRFEAARRIYNSLLNFELKKLRQLERTVEYRQIQSVISSAYRSNTKDSPECKDAFKRREKLISANGISENGFKSDVKFFYKHFDGLIGSSVAVHCIAVQLWAAFDKYLSGSGKEIHFKRLGDISSLKGYSVKGKSGGREIIFRGQYIEWTRKKKKLLLPLKIDPDNEYEREMLSRRVKYVRIIKKPGKNRLRWYAQLTLEGKPALKYSAGTGKPIHSVGKGNVGIDIGPQTVAYASDKEVALLELADRVTNIEHQKKKLQRKLDRSRRATNPDNYKPDGTIKRGVKLTRNKSKRYLKLQSKLAYIQHRQAEIRKLQHTCLANHMLTLGDRFFVEKMNWPGLAHRAKETSISEKTGRYKRKKRFGKSLANKAPAMFISILKRKCETLGLPGVVEVDTFRLKASQYNHLSDTYEKKSLSERWNYMPISDGSDSSKTKRIQRDLYSAFLLQHTIPQPCSFDKEALRIDYPNFVTMHDAEIHRLESLPKTITSMGVRRSHS

SEQ ID NO: 2153 - protein, 527 aa, unidentified
  REGION 1..527: note = Category: MG81 effectors
  REGION 1..527: note = Description: MG81-431 effector
  source 1..527: note = uncultivated organism sequence
MKALAVYNHHIERRDSYEKSNTDTCCLTLPLKLEKWQEDRLAKRFEIARQIYNTMVHAELKKLRNIENSQPYRQIQKQIEALNWKNQNDKARLKSLYNDRNKLLNTIGFSEYGFKADIKYYYKHFNDNIGSSVAVHGIAPQVWAAFEKMLFHKEGKKVHYKKKDDIHSLHGYSVTGKSGGVEIIFRKTYIEWKGLKLPLKRSPDNAYETEMLGRRVKYVRLLRKPGKRKDCWYAQLSLEGKPAIKRDPESGKRRHSIGRGAVGLDIGPQTLAYSACGAADLVELADQVQNIEQMKRRLQRKLDRSRRATNPDNYADNGTIRRGVKLTHNKSNRYRRTQRELRYLQHCQAEIRKRQHIELANHLLALGDCFYVEDMAWPSLTHRAKETAISEKTGRIKRKKRFGKSVANKAPATLIGILEQKCNSLGLPGVVKVPTSLRASQYNHQSGEYTSKPLSQRWNNMPDGERIQRDLYSAFLLQHYDPKAGNFDSALLQQDYPQFVQYHHRAIQRLSTVPKTLSSMGIQRSLR

SEQ ID NO: 2154 - protein, 536 aa, unidentified
  REGION 1..536: note = Category: MG81 effectors
  REGION 1..536: note = Description: MG81-432 effector
  source 1..536: note = uncultivated organism sequence
MDNEEKEKDGATCCLTLPLKLEKWQSDHLEKRFEIARQLYNTLVHAELKRIHRIERMPEYREIERLIEATTDKKEKWALKNQKKQFLRKNGINRNTFTTDMKRLYKHFNDNIGSNVAQHGIVSQVLTAFEKVYIENQSGEVHFKKPGDLRSVQGYSQKKSGGVEIMFREGKIIWNQQGNNDRKGVAREFPLKLSPDNSYEAEMLKKHVKFVRILRKEGKTKSHWYAQLVLEGKPTVKRDPISGAPKHPVGHGVVGIDIGTRTLAYSTDSEVNLLELADRVQNIEQEKRRLQRKMDRSRRAMNPENYNSDGTFKRGVKLTRNKSKRYRRIQHQLAMIQHHQADIRKQQHNELANYLLTLGDCFFVENMSYCDLVHRANKTEISEKTGRYKRKKRFGKSIANKAPAMLITMLKQKCQSRGLEGVKEVDTHVRASQYNHQTDTCIEKALENRWNVMPDGERIQRDLYSAFLLQHCKQGLPEYDRKELKKEFGEELYRVFDREALQRDYPQFVAYHHMTIQRLSELPHTIPSMGIRRIIS

SEQ ID NO: 2155 - protein, 526 aa, unidentified
  REGION 1..526: note = Category: MG81 effectors
  REGION 1..526: note = Description: MG81-433 effector
  source 1..526: note = uncultivated organism sequence
MNNEEKEKDGATCCLTLPLKLEKWQSDRLEKRFEIGRQIYNTIVHAELKKLRKLERTQQYQEIEQKLENAKQEETKELWKKKRQLLDQNGLSENHFKADMKHYYPHFKDNIASSVAVHGIASQAWTAFEKVLLSKDGKMVHFKKKGELSSLRGYSQAGKSGGIEIIFRGSYVEWKGLKLPLKLSPDNDYETEMLSKRVKYVRILRKDGKTKTHWYAQLALEGKPAVKRDSISGAPKHPVGHGVVGIDIGTRTLAYSTDKEVNLLELADRVQNIEQEKRRLQRKMDRSRRAMNPGNYKPDGSIKQGVKLTWNNSKRYKRIQHQYAMIQHHQADIRKQQHNELANYLLTLGDCFFVENMSYCDLAHRANKTEISEKTGRYKRKKRFGKSIANKAPAMLITMLKQKCQSRGLEGVKEVDTHVCASQYNHQTDTCIKKALENRWNIMPDGERIQRDLYSAFLLQHCRRDLPEYNRKELQKEFGEELYRVFDREALQRDYPQFVAYHHMTIQRLSELPHTIPSMGIRRIIS

SEQ ID NO: 2156 - protein, 538 aa, unidentified
  REGION 1..538: note = Category: MG81 effectors
  REGION 1..538: note = Description: MG81-434 effector
  source 1..538: note = uncultivated organism sequence
MNNEEKEKDGATCCLTLPLKLEKWQSDHLEKRFEIARQLYNTLVHAELKKKCQVERMPEYQEIMKMIDAASNQKEKWALEKKRKAFLEENGFSRNAFKADMEKYYKHFNDNIGANVALHGITAQVWIAFDKVFVDNYKQKGKVHFKKPGELCSVQGYSQKKSGGKEIMFREDRIIWNQQGNRDRKKVKREFLLKLSPDNPYEAEMLKRHVKFVRILRKDGKTKPHWYAQLVLEGKPAVKRDPASGAPKHPIGHGVVGIDIGTRTLAYSTDKEVNLLELADRVQNIEQEKRRLQRKMDRSRRAMNPGNYKPDGSIKQGVKLTWNNSKRYKRIQHQYAMIQHHQADIRKQQHNELANYLLTLGDCFFVENMSYCDLAHRANKTEISEKTGRYKRKKRFGKSIANKAPAMLITMLKQKCQSRGLEGVKEVDTHVCASQYNHQTDTCIKKALENRWNIMPDGERIQRDLYSAFLLQHCRRDLPEYNRKELQKEFGEELYRVFDREALQRDYPQFVAYHHMTIQRLSELPHTIPSMGIRRIIS

SEQ ID NO: 2157 - protein, 548 aa, unidentified
  REGION 1..548: note = Category: MG81 effectors
  REGION 1..548: note = Description: MG81-435 effector
  source 1..548: note = uncultivated organism sequence
MEWKSTGRGGTLVDNEEKKEDGATCCLTLPLKLEKWQSDHLEKRFEIARQLYNTLVHAELKRIHRIERMPEYREIERQIEATTDKKEKWALKNQKKQFLRKNGINRNTFTTDMKRLYKHFNDNIGSNVAQHGIVSQVLTAFEKVYIENQSGEVHFKKPGDLRSVQGYSQKKSGGVEIMFREGKIIWNQQGNNDRKGVAREFPLKLSPDNSYEAEMLKKHVKFVRILRNEGKTKPHWYAQLVLEGKPAIKRDPASGAPKHPVGHGVVGIDIGTRTLAYSTDSEVNLLELADRVQNIEQEKRRLQRKMDRSRRAMNPENYNSDGTFKRGVKLTRNKSKRYRRIQHQLAMIQHHQADIRKQQHNELANYLLTLGDCFFVENMSYCDLVHRANKTEISEKTGRYKRKKRFGKSIANKAPAMLITMLKQKCQSRGLEGVKEVDTHVRASQYNHQTDTCIEKALENRWNVMPDGERIQRDLYSAFLLQHCKQGLPEYDRKELKKEFGEELYRVFDREALQRDYPQFVAYHHMTIQRLSELPHTIPSMGIRRIIS

SEQ ID NO: 2158 - protein, 341 aa, unidentified
  REGION 1..341: note = Category: MG81 effectors
  REGION 1..341: note = Description: MG81-436 effector
  source 1..341: note = uncultivated organism sequence
MLPLKIDPDNEYEREMLSRRVKYVRIIKKPGKNRLRWYAQLTLEGKPALKYSAETGKPIHSVGKGNVGIDIGPQTVAYASDKEVALLELADRVTNIEHQKKKLQRKLDRSRRATNPDNYKPDGTIKRGVKLTRNKSKRYLKLQSKLAYIQHRQAEIRKLQHTCLANHMLTLGDRFFVEKMNWPGLAHRAKETSISEKTGRYKRKKRFGKSLANKAPAMFISILKRKCETLGLPGVVEVDTYSLKASQYNHLSDTYEKKSLSERWNYMPISDGSDSSKTKRIQRDLYSAFLLQHTIPQPCSFDKEALRIDYPNFVTMHDAEIHRLESLPKTVTSMGVRRSHS

SEQ ID NO: 2159 - protein, 538 aa, unidentified
  REGION 1..538: note = Category: MG81 effectors
  REGION 1..538: note = Description: MG81-437 effector
  source 1..538: note = uncultivated organism sequence
MDNEEKKEDGATCCLTLPLKLEKWQSDHLEKRFEIARQLYNTLVHAELKKKCQVERMSEYQEIMKMIDAASNQKEKWALEKKRKAFLEENGFSRNAFKADMEKYYKHFNDNIGANVALHGITAQVWIAFDKVFVDNYKQKGKVHFKKPGELCSVQGYSQKKSGGKEIMFREDRIIWNQQGNRDRKKVKREFLLKLSPNNPYEAEMLKRHVKFVRILRKDGKTKPHWYAQLVLEGKPAVKRDPISSAPKHPVGHGVVGIDIGTRTLAYSTDKEVNLLELADRVQNIEQEKRRLQRKMDRSRRAMNPENYNSDGTFKRGVKLTRNKSKRYRRIQHQLAMIQHHQADIRKQQHNELANYLLTLGDCFFVENMSYCDLVHRANKTEISEKTGRYKRKKRFGKSIANKAPAMLITMLKQKCQSRGLEGVKEVDTHVRASQYNHQTDTCIEKALENRWNVMPDGERIQRDLYSAFLLQHCKQGLPEYNRKELKKEFGEELYRVFDREALQRDYPQFVAYHHMTIQRLSELPHTIPSMGIRRIIS

SEQ ID NO: 2160 - protein, 522 aa, unidentified
  REGION 1..522: note = Category: MG81 effectors
  REGION 1..522: note = Description: MG81-438 effector
  source 1..522: note = uncultivated organism sequence
MKRSSTDTCCLTLPLKLEKWQSDRLEKRFEIGRQIYNTIVHAELKKLRKLERMQQYQEIEQKLENAKQEETKELWKKKRQLLDQNGLSEDHFKADMKYYYPHFKDNIASNVAVHGIASQAWTAFEKVLFSKDGKMVHFKKKGELSSLRGYSRAGKSGGVEIIFRGSYVEWKGLKLPLKLSPDNDYETEMLSKRVKYVRILRKDGKTKTHWYAQLVLEGKPTVKRDPISGAPKHPVEHGVVGIDIGTRTLAYSTDSEVNLLELADRVQNIEQEKRRLQRKMDRSRRAMNPENYNSDGPFKRGVKLTRNKSKRYRRIQHQLAMIQHHQADIRKQQHNELANYLLTLGDCFFVENMSYCDLVHRANKTEISEKTGRYKRKKRFGKSIANKAPAMLITMLKQKCQSRGLKGVKEVDTHVRASQYNHQTDTCIEKALENRWNVMPDGERIQRDLYSAFLLQHCKQGLPEYNRKELKKEFGEELYRVFDREALQRDYPQFVAYHHMTIQRLSELPHTIPSMGIRRIIS

SEQ ID NO: 2161 - protein, 524 aa, unidentified
  REGION 1..524: note = Category: MG81 effectors
  REGION 1..524: note = Description: MG81-439 effector
  source 1..524: note = uncultivated organism sequence
MAKNNNTDTCVLTLPLRVEKWQEDCLLKRFEAARRIYNSLLNFELKKLRQLERTVEYRQIQSVISSAYRSNTKDSPECKDAFKRREKLISANGISEYGFKSDVKFFYKHFDGLIGSSVAVHCIAVQLWAAFDKYLRGSGKEIHFKRLGEISSLKGYSVKGKSGGLEIIFRGQYVEWTRKKKKLLLPLKIDPDNEYEREMLSRRVKYVRIIKKPGKNRLRWYAQLTLEGKPALKYSAETGKPIHSVGKGDVGIDIGPQTVAYASDKEVALLELADRVTNIEHQKKKLQRKLDRSRRATNPDNYKPDGTIKRGVKLTRNKSKRYLKLQSKLAYIQHRQAEIRKLQHTCLANHMLTLGDRFFVEKMNWPGLAHRAKETSISEKTGRYKRKKRFGKSLANKAPAMFISILKRKCETLGLPGVVEVDTFRLKASQYNHLSDTYEKKSLSERWNYMPISDGSDSSKTKRIQRDLYSAFLLQHTIPQPCSFDKEALREDYPNFVTMHDAEIHRLESLPKTITSMGVRRSHS

SEQ ID NO: 2162 - protein, 511 aa, unidentified
  REGION 1..511: note = Category: MG81 effectors
  REGION 1..511: note = Description: MG81-441 effector
  source 1..511: note = uncultivated organism sequence
MKKSNTDTCCLTLPLKLEKWQEDRLAKRFEIARQLYNTLVHAELKRLAQVKQTAEYRENERKIRTLDRNNPADRAELSELYQKQKTMLDAKFRKSYFKKHMENYYKHFRDNIGSSVAVHGIAPQVWAAFDKVLFKKGGKKVHYKKPGEVNSVQGYSRTGKSGGREIMFRGAYIEWKGLKLPLKLSPDNAYETDMLQRRVKLVRLVRRPGKRRDRWYAQLVLEGKPAIKADPVTGKAVHPIGSGPIGLDIGPQTLAYSAAGAAGLVELADRVQNIEQEKRRLQRKMDRSRRATNPDNYAEDGTIRRGVKLTHYKSKRYRRRQQELKYLQHRQAEIRKLQHIQLANHLLSLGDHFYVEKMEWSSLTHRAKETVISEKTGKPRSKRRFGKSIANKAPAMLIEILRQKCKSLGLSDVVEITPADIKASQYNHLTGKYVKKSLSRRWNDMQDGEHLQRDLYSAFLLQHYDSCSKTLDLDSLARDYPAFVQYHHREIERLHALPKTPSSMGIRRSIA

SEQ ID NO: 2163 - protein, 508 aa, unidentified
  REGION 1..508: note = Category: MG81 effectors
  REGION 1..508: note = Description: MG81-442 effector
  source 1..508: note = uncultivated organism sequence
MADKECCVLTLPLQTEIWQEHIIEKRFAIMEHLKNQLIAKELRRLKNLERTKEYRNLIDEINNTPKEKRKALFSKRRKLLKDNGFNRNKFKDDMAVMQKHFEEHIATQIAQEAASDVWRSFDKYLFNNGKYIHFTRKGSLSSINCQKINNGMKYIDGYFIWTCGICSGKRDRRIILKIKVTPPKNEYEKEMLSKKIKYLRIVKKWVKTRYKYYLQFALEGKPVKKDRIVNKCNVGIDIGTQTVAISSADSVKILELADKIDKNHTKKKILQRKMDRSRRYTNPQNYNEDGTIKKPPKGQRFSWYKSKKYIQLAGKVRELERKNADIRKYQHTCLANWILSLGDTVYVEQMNFSGLQRRAKETKIDKNGKYAKKKRYGKSLANKAPSMFLTILESKLNQYGGQLNKINTYEFKASQYDHTDDTFTKHNRSERWHILSNGDKNQRDLYSAFLIMNSDISLKHCNREKCNETYSNFKVLQDKEIERLYSDIRKGNCKNISSFGFQRNAKAM

SEQ ID NO: 2164 - protein, 578 aa, unidentified
  REGION 1..578: note = Category: MG81 effectors
  REGION 1..578: note = Description: MG81-443 effector
  source 1..578: note = uncultivated organism sequence
MAFGSKNSTPSFVLTLPMVIGLNEQDYLNKEFKKCGIIYNQLVNATTKMWHQLRKTRKYRELMAAIAKAAPDSDEQKALFKQREKMLKEYRFSEDAFHAMVVPYAKHYAINSHVAQSIATAVWTAWSSFFFDKGKGVHYKKLEYVSSISGKNNATGIMLRPANHTTSVINSAKTKAKNSIEKKYFAAYRKPDAKEGEEVVLPDEVKAQMEKEIAAATAKVKTSIGKGKLHITYGDYTFPVTLRNPDTQTGWYQQEALKCGVKYCRIIRKWVSTKWKYYAQIVLEGYPPIKCDNNGVAKHPVKQGRVGIDIGTQTIAFSGKDVCDLRVLAPAARAQAKSLVNEIASTLRAMDRSRRATNPKYYNPDGTIKRLKRQHGQKQKRKWKYSKRYYRLRAKLRNLYRKLADIRKMEHNILANELLANGNEFVVEDMNYKALQKRSKETKINPKTGRAYTKKRFGKSLSRCAPAMFISILGKKANRYGGSVIKVSTFETKASQFDHTDESYTKKKLSERMARLRSGDIVQRDLYSAFLLEHIDTESLQYNMETLNSVFPAFLEMHENTKRRLQAVGSSLPASIGF

SEQ ID NO: 2165 - protein, 508 aa, unidentified
  REGION 1..508: note = Category: MG81 effectors
  REGION 1..508: note = Description: MG81-444 effector
  source 1..508: note = uncultivated organism sequence
MADKECCVLTLPLQTEIWQEHIIEKRFAIMEHLKNQLIAKELRRLKNLERTKEYRNLIDEINNTPKEKRKALFSKRRKLLKDNGFNRNKFKDDMAVMQKHFEEHIATQIAQEAASDVWRSFDKYLFNNGKYIHFTRKGSLSSINCQKINNGMKYIDGYFIWTCGICSGKRDRRIILKIKVTPPKNEYEKEMLSKKIKYLRIVKKWVKTRYKYYLQFALEGKPVKKDRIVNKGNVGIDIGTQTVAISSADSVKILELADKIDKNHTKKKILQRKMDRSRRYTNPQNYNEDGTIKKPPKGQRFSWYKSKKYIQLAGKVRELERKNADIRKYQHTCLANWILSLGDTVYVEQMNFSGLQRRAKETKIDKNGKYAKKKRYGKSLANKAPSMFLTILESKLNQYGGQLNKINTYEFKASQYDHTDDTFTKHNRSERWHILSNGDKNQRDLYSAFLIMNSDISLKHCNREKCNETYSNFKVLQDKEIERLYSDIRKGNCKNISSFGFQRNAKAM

SEQ ID NO: 2166 - protein, 508 aa, unidentified
  REGION 1..508: note = Category: MG81 effectors
  REGION 1..508: note = Description: MG81-445 effector
  source 1..508: note = uncultivated organism sequence
MADKECCVLTLPLQTEIWQEHIIEKRFAIMEHLKNQLIAKELRRLKNLERTKEYRNLIDEINNTPKEKRKALFSKRRKLLKDNGFNRNKFKDDMAVMQKHFEEHIATQIAQEAASDVWRSFDKYLFNNGKYIHFTRKGSLSSINCQKINNGMKYIDGYFIWTCGICSGKRDRRIILKIKVTPPKNEYEKEMLSKKIKYLRIVKKWVKTRYKYYLQFALEGKPVKKDRIVNKGNVGIDIGTQTVAISSADSVKILELADKIDKNHTKKKILQRKMDRSRRYTNPQNYNEDGTIKKPPKGQRFSWYKSKKYIQLAGKVRELERKNADIRKYQHTCLANWILSLGDTVYVEQMNFSGLQRRAKETKIDKNGKYAKKKRYGKSLANKAPSMFLTILESKLNQYGGQLNKINTYEFKASQYDHTDDTFTKHNRSERWHILSNGDKNQRDLYLAFLIMNSDISLKHCNREKCNETYSNFKVLQDKEIERLYSDIRKGNCKNISSFGFQRNAKAM

SEQ ID NO: 2167 - protein, 508 aa, unidentified
  REGION 1..508: note = Category: MG81 effectors
  REGION 1..508: note = Description: MG81-446 effector
  source 1..508: note = uncultivated organism sequence
MADKECCVLTLPLQTEIWQEHIIEKRFAIMEHLKNQLIAKELRRLKNLERTKEYRNLIDEINNTPKEKRKALFSKRRKLLKDNGFNRNKFKDDMAVMQKHFEEHIATQIAQEAASDVWRSFDKYLFNNGKYIHFTRKGSLSSINCQKINNGMKYIDGYFIWTCGICSGKRDRRIILKIKVTPPKNEYEKEMLSKKIKYLRIVKKWVKTRYKYYLQFALEGKPVKKDRIVNKGNVGIDIGTQTVAISSADSVKILELADKIDKNHTKKKILQRKMDRSRRYTNPQNYNEDGTIKKPPKGQRFSWYKSKKYIQLAGKVRELERKNADIRKYQHTCLANWILSLGDTVYVEQMNFSGLQRRAKETKIDKNGKYAKKKRYGKSLANKAPSMFLTILGSKLNQYGGQLNKINTYEFKASQYDHTDDTFTKHNRSERWHILSNGDKNQRDLYSAFLIMNSDISLKHCNRKKCNETYSTFKVLQDKEIERLYSDIRKGNCKNISSFGFQRNAKAM

SEQ ID NO: 2168 - protein, 551 aa, unidentified
  REGION 1..551: note = Category: MG81 effectors
  REGION 1..551: note = Description: MG81-447 effector
  source 1..551: note = uncultivated organism sequence
MSNLLFLLENEEKMRYNGVEKQREGEGTRVKRSSTDTCCLTLPLKLEKWQSDRLEKRFEIGRQIYNTIVHAELKKLRKLERTQQYQEIEQKLENAKQEETKELWKKKRQLLDQNGLSENHFKADMKYYYPHFKDNIASSVAVHGIASQAWTAFEKVLLSKDGKMVHFKKKGELSSLRGYSQAGKSGGIEIIFRGSYVEWKGLKLPLQLSPNNEYETEMLSKRVKYVRILRKDGKTKTHWYAQLALEGKPAVKRDSISGAPKHPVGHGVVGIDIGTRTLAYSTDSEVNLLELADRVQNIEQEKRRLQRKMDRSRRAMNPENYNSDGTFKRGVKLTRNKSKRYRRIQHQLAMIQHHQADIRKQQHNELANYLLTLGDCFFVENMSYCDLVHRANKTEISEKTGRYKRKKRFGKSIANKAPAMLITMLKQKCQSRGLKGVKEVDTHVRASQYNHQTDTCIEKALENRWNVMPDGERIQRDLYSAFLLQHCKQGLSEYNRKELKKEFGEELYRVFDREALQRDYPQFVAYHHMTIQRLSELPHTIPSMGIRRIIS

SEQ ID NO: 2169 - protein, 512 aa, unidentified
  REGION 1..512: note = Category: MG81 effectors
  REGION 1..512: note = Description: MG81-448 effector
  source 1..512: note = uncultivated organism sequence
MKKSSTDTCCLTLPLKLEKWQEDRLAKRFEIARQLYNTLVHAELKRLAQVKQTAEYRENERKIRTLDWNNPAHRTELEKLYEERRKSLKKAGFTDNSFTTDMGKYYKHFRDNIGSSVAVHGIAPQVWAAFDKLLFKKGGKKVHCKRPGEVNSVQGYSRTGKSGGREIMFRGAYIEWKGLKLPLKLSPDNAYETDMLQRRVKLVRLVRRPGKRRDRWYAQLVLEGKPAIKADPVTGKAVHPIGSGPVGLDIGPQTLAYSAAGVAGLVELADRVQNIEQEKRCLQRKMDRSRRATNPDNYAEDGTIRRGVKLTHNKSKRYRRNQQELKYLQHHQAEIRKLQHIQLANHLLSLGDHFYVEKMEWSSLTRRAKKTVISEKTGKPRSKKRFGKSIANKAPAMLIEILRQKCKSLGLPNVVEINPADIKASQYNHLTGEYVKKSLSRRWNDMQDGEHLQRDLYSAFLLQHYDSMSKALDLDSLARDYPAFVQYHHREIERLHALPKTPASMGIRRSIA

SEQ ID NO: 2170 - protein, 511 aa, unidentified
  REGION 1..511: note = Category: MG81 effectors
  REGION 1..511: note = Description: MG81-449 effector
  source 1..511: note = uncultivated organism sequence
MGKSSTDTCCLTLPLKLEKWQEDRLAKRFEIARQIYNTMVRAELKKLDRVKQLPEYRKNQKEIQALDGKNSADRARLKELRANQNRILQKQGFTKYGFKSDSKDYYKHFIENIGSSVATHGIAPQVWNAFDKMLFQKDGKVVHFKRYGDVHSLKGGSVAHKSGGAEIMFRKTYIEWKGLKLPLKLSPNNAYEAEMLSYRVKYVRILRTRGKTKDRWYAQLSLEGKPAVKYDSSTGKPVHPVGRGAVGLDIGPQTLAYVAANEANLVELADQVQNIEQEKRRLQRKLDRSRRATNPDNYNENGTIRRGVKLTHNKSKRYCKLQKELSWIQHCQAETRKRQHIALANHLLSLGDCFYVEPMAWPSLTHRAKKTEVSEETGRIKRKKRFGKSVANKAPASLIGILKLKCISLGLTGVVEVPMLLRASQYNHQSKDYAKKSLSQRWNDMPDGNRIQRDLYSAFLLQHYNSQSESFDQETLERDYPQFVRLHNQTIQRLSALPKTPSSMGIRRSVS

SEQ ID NO: 2171 - protein, 496 aa, unidentified
  REGION 1..496: note = Category: MG81 effectors
  REGION 1..496: note = Description: MG81-450 effector
  source 1..496: note = uncultivated organism sequence
MSEKKLGNTVLTLPLYPEKWQIDIIEKRFRIMELLKNALIAKELRRLRNLQRTRVWRRLEDEIRSTDKTERKKLYARRTELLRTAGFSKYGFYEDMEPMQKRYIVHIGAQVAQRASSDVWQAFEKMLYGNGDMVHFHKAGSLYSIANKKSGNCMIFRNGCLEWNGGQSRDAVKLILPSKARLTDYERQMLEKPIKYYRVIRKWMKTRWKYYVQITLAGETVHKDRPVGAGRVGIDIGTRTIAVAAEKAVFLRELADGVDENHRRKCALQRKMDNSRRSTNPENYNPDGTVRRPGKGHRPHWVKSRRYLKMQAMVRNLERKNADIRKYQHICLANEIIRLGTDVYVEQMSYSGLQRRAKETTYDDKGRAKKKKRFGKSLANKAPASFLLILNQKLSYLEPTGLKHVDTKAFRASQLDHTDQSYHSKKLGERWTVLSDGTKVQRDMYSAFLLMNSNAEMNGVDLEQCNQTFEHFKYMHDRAIETIRNDGKRHPASFGV

SEQ ID NO: 2172 - protein, 511 aa, unidentified
  REGION 1..511: note = Category: MG81 effectors
  REGION 1..511: note = Description: MG81-451 effector
  source 1..511: note = uncultivated organism sequence
MKKSNTDTCCLTLPLKLEKWQEDRLAKRFEIARQIYNTMVHAELKKLRNIENSQPYRQIQKQIEALNWKNQNDKARLKSLYNDRNKLLNTIGFSEYGFKADIKYYYKHFNDNIGSSVAVHGIAPQVWAAFEKMLFHKEGKKVHYKKKDDIHSLHGYSVTGKSGGVEIIFRKTYIEWKGLKLPLKRSPDNAYETEMLGRRVKYVRLLRKPGKRKDCWYAQLSLKGKPAIKRDPESGKRRHSIGRGAVGLDIGPQTLAYSACGAADLVELADQVQNIEQMKRRLQRKLDRSRRATNPDNYADNGTIRRGVKLTHNKSNRYRRTQRELRYLQHCQAEIRKRQHIELANHLLALGDCFYVEDMAWPSLTHRAKETAISEKTGRIKRKKRFGKSVANKAPATLIGILEQKCNSLGLPGVVKVPTSLRASQYNHQSGEYTSKPLSQRWNNMPDGERIQRDLYSAFLLQHYDPKAGNFDSVLLQQDYPQFVQYHHRAIQRLSTVPKTLSSMGIQRSLR

SEQ ID NO: 2173 - protein, 530 aa, unidentified
  REGION 1..530: note = Category: MG81 effectors
  REGION 1..530: note = Description: MG81-452 effector
  source 1..530: note = uncultivated organism sequence
MILLANNNNNNNTDTCVLTLPLRVEKWQEDCLLKRFEAARRIYNSLLNFELKKLRQLERTVEYRQIQSVISNAYRSNTKDSPECKAALKRREKLIDENGLTKNGFKNDVKFFYKHFDGLIGSSVAVHCIAVQLWAAFNKYLCGNGKEIHFKRLGDISSLKGYSVKGKSGGCEIIFRGQYVEWTRKKKKLLLPLKIDPDNEYEREMLSRRVKYVRIIKKPGKNRLRWYAQLTLEGKPALKYSAETGKPIHSVGKGDVGIDIGPQTVAYASDKEVALLELADRVTNIEHQKKKLQRKLDRSRRATNPDNYKPDGTIKRGVKLTRNKSKRYLKLQSKLAYIQHRQAEIRKLQHTCLANHMLTLGDRFFVEKMNWPGLAHRAKETSISEKTGRYKRKKRFGKSLANKAPAMFISILKQKCETLGLPGVVEVDTFRLKASQYNHLSDTCEKKSLSERWNYMPISDGSDSSKTKRIQRDLYSAFLLQHTIPQSCSFDKEALRIDYPNFVTMHDAEIHRLESLPKTITSMGVRRSHS

SEQ ID NO: 2174 - protein, 488 aa, unidentified
  REGION 1..488: note = Category: MG81 effectors
  REGION 1..488: note = Description: MG81-453 effector
  source 1..488: note = uncultivated organism sequence
MTNQEYNKLLKQYHKLSDRHILVAETDMPYSDVQKVVALSDKIRKAGNELVGLMRKNHDQLMRTKKYRKLLNLYGNTENKVHRKSLAKQLNEMQKAYNVTWDFCRTSMIPIGKKYGIDAVFALTKAEDVWRGMEKCLYGNGEMLHFSKYGELPCIRAKQINRGIPISIKDNKVQFKLGKIMFGLQIKDRFQTDEINSVMSYLANPEIMDTKAVDTFIEGARCIDTYRPCYATLVPKFIRGKYRVYLHLTIEGKAKPKYDKFGNPRHKYGKGIIGADIGTQTVAYTSDTEVGIKNLSERGNSIQDSERLERLYYRAMDRSRRATNPQNYNDNGTVKRGKKSWKYSNHYKKLRAKHSELCRINAVNRQLAINEDANHLRSLGDTIITEPKNASKLMLRVKKTTKNAKGKFNKKKRFGKSIKSRCPGGFQTTVKNKFKVSGGTYIEVPNNYRASQYDHTADEYIKKKLSDRLYKLRDGTLVQRDWYSSFLL

SEQ ID NO: 2175 - protein, 511 aa, unidentified
  REGION 1..511: note = Category: MG81 effectors
  REGION 1..511: note = Description: MG81-454 effector
  source 1..511: note = uncultivated organism sequence
MAKCSTDTCCLTLPLRLEKWQEDRLAKRFEIARQIYNTMVRAELKKLRAMEQSEPYKANQEKIQALDWKTQTDKQALKALYKERDKLLRDGGFSEYGFKSDIKNYYKHFNNNIGSNVAFHGIVPQVWAAFEKMLFKKEGKKVHFKKKGDIHSLRGYSAAGKSGGVEIIFRETYIEWKGLKLPLKLSPDNIYETQMLSYRVKYVRLLRKPGKRKDRWYAQLSLEGKPVIKYNPKTGEVRHPIGKGAVGLDIGPQTLAYSAATGADLVELANQVQNVEQEKRRLQRKLDRSRRATNPGNYADDGTIRRGIALTHNKSKRYLRTQQELKYLQHQQAEIRKRQHTELANHLLSLGDCFYVEKMVWTSLTHRAKETEISEKTGKIKRKKRFGKSVANKAPATLIGILQRKSAALGIPGVIEVPTSVKASQYNHQSGTYTPKPLSQRWNNMPDGERIQRDLYSAFLLQHYDPQTNTFDANSLHQDYPQFVQYHHDAVLRLYAMPKTPSSMGIKRSLR

SEQ ID NO: 2176 - protein, 338 aa, unidentified
  REGION 1..338: note = Category: MG81 effectors
  REGION 1..338: note = Description: MG81-455 effector
  source 1..338: note = uncultivated organism sequence
MGKSSTDTCCLTLPLKLEKWQEDRLAKRFEIARQIYNTMVRAELKRLRQVEQSPQYRSNKKAIQALDWKNTADKPKLKTLYRERDKLLKGGGFTEYGFKSDIKNFYKHFAENIGSSVAVHGIAPQVWAAFERVLFKKEGKKVHFKKTGDIRSLRGYSVTGKSGGVEIIFRGSYIEWKGLNLPLKLSPDNAYETEMLSYRVKYVRILRKPGKTRDRWYAQLSLEGKPAIKRNPASGNPVHPVGQGAVGLDIGPQTLAYAAEKEANLVELADRVQNIEREKHLLQRKMDRSRRAANPDNYAENGTIRRGVKLTHNKSKRYLRLQRELCYLQHCQAETRKR

SEQ ID NO: 2177 - protein, 511 aa, unidentified
  REGION 1..511: note = Category: MG81 effectors
  REGION 1..511: note = Description: MG81-456 effector
  source 1..511: note = uncultivated organism sequence
MAKCSTDTCCLTLPLRLEKWQEDRLAKRFEIARQIYNTMVRAELKKLRAMEQSEPYKANQEKIQALDRKTQTDKQALKALYKERDKLLRDGGFSEYGFKSDIKNYYKHFNNNIGSSVAVHGIAPQVWAAFEKMLFKKEGKKVHFKKKGDIHSLRGYSATGKSGGVEIIFRETYIEWKGLKLPLKLSPDNIYETQMLSYRVKYVRLLRKPGKRKDRWYAQLSLEGKPVIKYNPKTGEVRHPIGKGAVGLDIGPQTLAYSAATGADLVELANQVQNVEQEKRRLQRKLDRSRRATNPGNYADDGTIRRGIALTHNKSKRYLRTQQELKYLQHQQAEIRKRQHTELANHLLSLGDCFYVEKMVWTSLTHRAKETEISEKTGKIKRKKRFGKSVANKAPATLIGILQRKSAALGIPGVIEVPTSVKASQYNHQSGTYTPKPLSQRWNNMPDGERIQRDLYSAFLLQHYDPQTNTFDANSLHQDYPQFVQYHHDAVLRLYAMPKTPSSMGIKRSLR

SEQ ID NO: 2178 - protein, 519 aa, unidentified
  REGION 1..519: note = Category: MG81 effectors
  REGION 1..519: note = Description: MG81-457 effector
  source 1..519: note = uncultivated organism sequence
MPTKQKEGGNRCVLTLPLLTEPWQEHIIEKRFKIIEHLKNQLISIELRKLKNLQRTKAYKNLIKQIESVPKSERTALYKERNKMLEGKGFSRNVFQDDLGVMQNQFAEHINVQISHRAAWDVWSSFEKFLFGSGQMIHYQKRGTLKSIASKSPKNGMHYFPESNTFKWSGGRQKKIGQKGEQKKVSIKPISLCLRVSPLKTDYEKEMVANNEIKYYRVVRKWMKTKYKYYLQITFAGKPADKHREISTGRVGIDIGTQTIAIASDKSVKLLELADKVNKNHIKKCELQRKLDRSRRYTNPDNFNPDGTVKRGTKGHKLKWNKSKHYLEIAGKIRELERKNADIRKYQHTCLANDILAMGNQIYIEPMNYKGLQKRAKETQVDEKGRYKKKKRFGKSLANKAPAMFVTILKTKAEQHGGEVYEVDIMLYRASQCDHTTGEYTKHGLNDRWRILGNGDKVQRDLYSAFLIKNSNKTHDEIDLDKCSKTYDSFKKLHDKEIENIRNEVILRKRRNISSYGIA

SEQ ID NO: 2179 - protein, 511 aa, unidentified
  REGION 1..511: note = Category: MG81 effectors
  REGION 1..511: note = Description: MG81-458 effector
  source 1..511: note = uncultivated organism sequence
MAQRHSTPTCCLTLPLQLEKWQEDRLIKRFEIAGKIYNALLNAELKKLHRLEQLPEYKEIQSQLKAYYQNNLPKTAAFKELNNRRSKLLSEHGFSEYAFKGDMKKFYKHFSSNIGSSVATHCIASQVWSAFEKRLFGGGKFVHFKKSGDIRSLKGFSSSRKSGGVEIMFRGDHIEWKGLLLRLKLDPDNQYESEMLSRRIKYVRIIRKPGKAKWRWYAQLSVEGLPAIKRNDETGEPVHPIGRGAVGIDIGPQTIAYVSQTEVALKELADRVQNIEHEKRLIQRKLDRSRRATNPANYADNGTIKRGVKLTRNKSKRYLKLQMELSFLQHKQAEIRKQQHINLANHLLSLGDCFYVEDMAWSSLARKAKETAVSEKTGKYKRKKRFGKSIANKAPASLISILDQKCTSLGLLGVIKVPTSVRASQYNHITKSYEKKTLSQRWNIMPDGRRIQRDIYSAFLLQHVTPQRDGFSDEALQQDYENFVSLHDSVIQQLRLMPKTIASMGIRRTYS

SEQ ID NO: 2180 - protein, 1358 aa, unidentified
  REGION 1..1358: note = Category: MG81 effectors
  REGION 1..1358: note = Description: MG81-459 effector
  source 1..1358: note = uncultivated organism sequence
MKISKIKNSRPGISVAENKNEESLSRQSLLYYAPVKDGKIRLESKDLEQHVTECNEKAQKLYNVITPEINFYRDENRQKMVENLARNFNAVINNALRSIRNPKEKKEQRVEKEVAFILNLSKKSIKMKKDVFVKSTDLIVKFPENNKYNKKNDKGTGSKEAYIQKMISDLVLRKLKNTLRKEVKLENGYRMQMTEIIISLMSAICLYGNAESFDPAILKAFFEKVDSDYTKYKYVEQIVKSIESQSAKLKVVEKDGRHLLISANADHRKKKYVFEFMRMYAAADEKEKRELTEHIQDLIGLYLCGKAGYENAENRFSDMTESHNCICGKIEEILNELEKPENLSQKKKENLKNTTVKVMALKYRAAVNYLADEVGKTVLGEIREKKVRSCADLYWIEYIDSTVEKLLLKSRNKDGYRYEIGFLSKHIWKEWTQYISGKYIEMGKGVYHFAIPDLSGNLEGEPISICEVKPEYRNGVSGFDYERIRAEESLEREMEKYVLFAVNNFARAVTPEEEREKSGHEDVLLMKTLSEIEESQTKEERQKKHDNNVKNAITLYADADRRILQFFGGQSRFREKEDSLINLYSGEDLYKEIRKELYAIRNITFHYTTKADKDQTQKHDLAEYLFEEEFSDITELFREKYYANNVWKYYDVEVINTIMENIYCGRKYRAAQVPAFKNIISRPELPQVMNGFVKGNSLRRLMNCPDRDVINKYWSALFFVLKELYYYDFLQEQKKPEDNVKERFFRAIEKLSGQENDDKKQKAWESFGNRIDQIGRDRSFGAICQGLMIEYMLQNSDISMVQTETDNGKANNKKQIYKHYRTLLYNCIREAFIEYLREKWEGLRTPVLTVKEWSKEEFCRADGLKHLSLFDHLKKTFNDAESGSSWYMAAHFINQKYLNHLLGSIRNYLQFTEDIEDRAISLGDCVDNKREEKNLRYRNTLEILEFVAQFCERTTNVMEDYFESNQEYAEYLSGFVDYNTTKKETDIEKALYSFCKQKFKVDGKEYMAGIYYDGENLIPNRNIIRANMYGNTSCLKPCMDRITLKEIRTMYADQNKLDLVLKEGVCHTEEEQKAYREYQNEKNRIELFDVCTYTQILNDMQARLIGWSYMRERDLMYYQLGYYYTKLFWTDSISEEDARRRLVGNLVNVEDGAILYQILAFNSYNLPIIANKNNTVTLLKDEGSIGGKAITAFFKNYENAEMIYEEALDLFENMDEHAAIINTRNYIEHFKYFIKSDRSMMDLYSEIYDRFFRHDHNRKKNVPDSLKNVLADNFMIVDIDMELGSKKVGEKKKGFREHKAARIEFTDSGIRSTDMTYTIKPDIKDNKKDKKVLVPARSEVFLKQFRKILEYRIQDKIQ

SEQ ID NO: 2181 - protein, 511 aa, unidentified
  REGION 1..511: note = Category: MG81 effectors
  REGION 1..511: note = Description: MG81-460 effector
  source 1..511: note = uncultivated organism sequence
MGKSSTDTCCLTLPLKLEKWQEDRLAKRFEIARQIYNTMVRAELKKLDRVKQLPEYRKNQKEIQALDWKNSADKQRLKELYGNQRKILQKQGFTEYSFKADSKDYYKHFIENIGSSVATHGIAPQVWNAFDKMLFQKDGKVVHFKRYGDVHSLKGGSVAHKSGGAEIMFRKTYIEWKGLKLPLKLSPNNAYEAEMLSYRVKYVRILRTRGKTKDRWYAQLSLEGKPAVKYDSNTGKPVHPVGRGAVGLDIGPQTLAYAAANEANLVELADQVQNIEQEKRRLQRKLDRSRRATNPDNYNENGTIRRGVKLTHNKSKRYCKLQKELSWIQHCQAETRKRQHIALANHLLSLGDCFYVEPMAWPSLTHRAKKTEVSEKTGRIKRKKRFGKSVANKAPASLIGILKLKCISLGLTGVVEVPMLLKASQYNHQSKGYAPKSLSQRWNDMPDGNRIQRDLYSAFLLQHYNSQLENFNQETLERDYPQFVRLHNQTIQRLSALPKTPSSMGIRRSVS

SEQ ID NO: 2182 - protein, 512 aa, unidentified
  REGION 1..512: note = Category: MG81 effectors
  REGION 1..512: note = Description: MG81-461 effector
  source 1..512: note = uncultivated organism sequence
MGKSSTDTCCLSLPLKLEKWQEDRLAKRFEIARQIYNTLVHAELKRLSQVKRSQQYREIENKIRALDRNDQEDKKELSLLHKLRDDLLRKSGVNDYGFKADIKYFYKHFGENIGANVAVHGIAPQVWSAFDSVLFKKRGKKVHYKKPGDICSLRGYSVTGKSGGSEIMFRGTYIEWKGLKMPLKLSPDNIYESEMLDHRVKYVRIVRKPGKRKDRWYAQLSLECKPVIKCDPVSGEMRHPVGKGPVGLDIGPQTLAYCALSEAGLVELADQVQDIEREKQRLQRRLDRSRRAANPNNYAADGTIKRGVKLTHNKSKRYCILQRELRYLQQQQAETRKRQHTELANYLLSLGDRFYVEDMNWSSLARRAKKTEISEKTGRYKRKKRFGKSIANKAPGSLIDILKQKCESLGIPGVEKLPTSLLKASQYNHQTGEYTPKPRSQRWNDMPDGERIQRDLYSAFLLQHYDPVSKGYDQAALQRDYPQFLQHHHHSIQRLTAKPKTPSSMGIHQRLR

SEQ ID NO: 2183 - protein, 353 aa, unidentified
  REGION 1..353: note = Category: MG81 effectors
  REGION 1..353: note = Description: MG81-462 effector
  source 1..353: note = uncultivated organism sequence
MSGKSGGTEIIFHKTYIAWKGLTLPLKLSPDNAYEKEMLMRRIKYVRILRKPGKHKDRWYAQLSLEGNPVVKLDPVSGLPRHPIGKGAVGIDIGPQTLAYSAEGGADLVELADQVQCIEQEKSRLQRKMDRSRRASNPDNYAQDGTIKRGVKLTYNKSRRYCKLQKELAYMLYRQAETRKRQHRELINRLLTMGDCFYIEDMHWNSLAHRAKKTEISEKTGRYKRKKRFGKSIANKAPAMLVDMLEQKCKSLELDVVMVNTSLKASQYNHQTGKYEKKTLSQRWNYMPDGEQIQRDLYSAFLLQHVVPEKNAFDNEALCRDYPKFVQYHHEVIERLRSLPKTISSMGIRQSVS

SEQ ID NO: 2184 - protein, 529 aa, unidentified
  REGION 1..529: note = Category: MG81 effectors
  REGION 1..529: note = Description: MG81-463 effector
  source 1..529: note = uncultivated organism sequence
MAKNNNNNNNDTDTCVLTLPLRVEKWQEDCLLKRFEAARRIYNSLLNFELKKLRQLERTVEYRQIQSVISSAYRSNTKDSPECKDAFKRREKLISANGLAEYGFKSDVKFFYKHFDGLIGSNVAVHCIAVQLWAAFNKYLSGSGKEIHFKRLGEISSLKGYSVKGKSGGREIIFRGQYIEWTRKKKKLLLPLKIDPDNEYEREMLSRRVKYVRIIKKPGKNRLRWYAQLTLEGKPALKYSAETGKPIHSVGKGNVGIDIGPQTIAYASDKEVALLELADRVTNIEHQKKKLQRKLDRSRRATNPDNYKPDGTIKRGVKLTRNKSKRYLKLQSKLAYIQHRQAEIRKLQHTCLANHMLTLGDRFFVEKMNWSGLAHRAKETSISEKTGRYKRKKRFGKSLANKAPAMFISILKRKCKTLGLPGVVEVDTYSLKASQYNHLSDTYEKKSLSERWNYMPISDGSDSSKTKRIQRDLYSAFLLQHTIPQPCSFDKEALRIDYPNFVTMHDAEIHRLESLPKTVTSMGVRRSHS

SEQ ID NO: 2185 - protein, 525 aa, unidentified
  REGION 1..525: note = Category: MG81 effectors
  REGION 1..525: note = Description: MG81-464 effector
  source 1..525: note = uncultivated organism sequence
MANNNNNTDTCVLTLPLRVEKWQEDCLLKRFEAARRIYNSLLNFELKKLRQLERTVEYRQIQSVISSAYRSNTKDSPECKAALKRREKLIDANDLTEYGFKSDVKFFYKHFDGLIGSSVAVHCIAVQLWAAFNKYLCGNGKEIHFKRLGDISSLKGYSVKGKSGGCEIIFRGQYVEWTRKKKKLLLPLKIDPDNEYEREMLSRRVKYVRIIKKPGKNRLRWYAQLTLEGKPALKYSAETGKPIHSVGKGDVGIDIGPQTVAYASDKEVALLELADRVTNIEHQKKKLQRKLDRSRRATNPDNYKPDGTIKRGVKLTRNKSKRYLKLQSKLAYIQHRQAEIRKLQHTCLANHMLTLGDRFFVEKMNWPGLAHRAKETSISEKTGRYKRKKRFGKSLANKAPAMFISILKQKCETLGLPGVVEVDTFRLKASQYNHLSDTCEKKNLSERWNYMPISDGSDSSKTKRIQRDLYSAFLLQHTIPQSCSFDKEALRIDYPNFVTMHDAEIHRLESLPKTITSMGVRRSHS

SEQ ID NO: 2186 - protein, 534 aa, unidentified
  REGION 1..534: note = Category: MG81 effectors
  REGION 1..534: note = Description: MG81-465 effector
  source 1..534: note = uncultivated organism sequence
MGWKSKGRGGKRVKKSSTDTCCLTLPLKLEKWQSDRLEKRFEIGRQIYNTVVRAELKKLHQVERTPQYREIEQKLKEAKQEEAKELWKKRTQLLSKSGFSEYGFKSDMKYYYQHFKENIGSSVAVHGIASQVWTAFEKVLFSKDGKMVHFKKKGELSSLRGYSQAGKSGGIEIIFRGSYVEWKGLKLPLKLSSNNDYETEMLSKRVKYVRILRKEGKTKPHWYAQLVLEGKPAIKRDPASGAPKHPVGHGVVGIDIGTRTLAYSADSKVDLIELADRVQNIELEKMLLQRKLDRSRRATNPENYKPDGTIKKGVKLTRNKSKRYRKIQHQLAMLQHRQADIRKRQHNELANYLLTLGDCFFVEDMDYRALTRKAKKTEISEKTGRYKRKKRFGKSIANKAPSMLIALLDQKCKSLNLEGVKKVDTAVKASQYNHQTDECKAKELKERWNIMPDGERIQRDLYSAFLLQHCKRGLPEYNRKKLQEAFGNELYRVFDREALQRDYPKFVEYHRETIQRLSALPKTIPSMGIRRIIS

SEQ ID NO: 2187 - protein, 512 aa, unidentified
  REGION 1..512: note = Category: MG81 effectors
  REGION 1..512: note = Description: MG81-466 effector
  source 1..512: note = uncultivated organism sequence
MKKCTTDTCCLTLPLKLEKWQEDRLAKRFEIARQIYNTLVRAEFKKLNELERTPEYKKILEQIHSLDWKDSGNRQRLNDLYRERNQILENAKFTEYGFKSDMKFYYKHFSDNIGSCVAVHGIAPQVWAAFEKYLFKPEGKKVHFKRFGDVHSLRGYSKAGESGGAEITFCGTHIRWKNLELPIKLSPDNAYETEMLSRRVKYVRILRKPGKSKDRWYVQLSLEGKPAIKYDRNAGEIKHPVAHGAVGLDIGPQTLAYSAETTADLVELADQVQNIEQEKRRLQRKMDRSRRSTNPGNYNTDGTIRRGVKLTRNKSKAYCKLQRQLAYLQHTQAETRKRQHTELANYLLSLGDCFYVEEMKWSSLAHRAKETAVSEKTGRFKQKKRFGKSIANKAPSTLIGILQQKCESLGLPGIIYVPLSAKASQYNHLTGEYTPKPLSQRWNTMPDAQRVQRDLYSAFLLQHFDSQAGTYNLQSLQRDYPQFLQYHDQSIRRLSEMPKTLSSMGIRKSIRA

SEQ ID NO: 2188 - protein, 538 aa, unidentified
  REGION 1..538: note = Category: MG81 effectors
  REGION 1..538: note = Description: MG81-467 effector
  source 1..538: note = uncultivated organism sequence
MDNEEKEKDGATCCLTLPLKLEKWQSDHLEKRFEIARQLYNTLVHAELKKKCQVVRMPEYQEIMKMIDAASNQKEKWALEKKRKAFLEENGFSRNAFKADMEKYYKHFNDNIGANVALHGITAQVWIAFDKVFVDNYKQKGKVHFKKPGELCSVQGYSQKKSGGKEIMFREDRIIWNQQGNRDRKKVKREFLLKLSPDNPYEAEMLKRHVKFVRILRKDGKTKPHWYAQLVLEGKPAVKRDPASGAPKHPIGHGVVGIDIGTRTLAYSTDSEVNLLELADRVQNIEQEKRRLQRKMDRSRRAMNPGNYKPDGSIKQGVKLTWNNSKRYKRIQHQYAMIQHHQADIRKQQHNELANYLLTLGDCFFVENMSYCDLAHRANKTEISEKTGRYKRKKRFGKSIANKAPAMLITMLKQKCQSRGLEGVKEVDTHVCASQYNHQTDTCIKKALENRWNIMPDGERIQRDLYSAFLLQHCRRDLPEYNRKELQKEFGEELYRVFDREALQRDYPQFVAYHHMTIQRLSELPHTIPSMGIRRIIS

SEQ ID NO: 2189 - protein, 505 aa, unidentified
  REGION 1..505: note = Category: MG81 effectors
  REGION 1..505: note = Description: MG81-468 effector
  source 1..505: note = uncultivated organism sequence
MAKATTETCCLTLPLKLEKWQADRLDKRLEIARQIYNTLLRFELKKLRILINSEEYKDIENKRSETTDTNEKKKLNKKLDDLRKKAGFTEYSFKTDIKDFYKHFKDNIGSSVAVHGIAPQVWQAFDRLLYGNGREVHFKKRGSINSLRGYSVAGKSGGVEIMFRGDHIEWKGLHLPIKLDPNNVYECEMLQKRIKYCRIVKKQGRSKDHWYVQLMLEGKPAVKCDRHTGELLHPIGSGAVGIDIGPQTIAYVADKEVALKELADKVNNIEHKKQILQRKLDRSRRAANPDNYAPDGTIKRGVKLTHNKSKRYISTQRELADLMRKQAETRKRQHNELANHLLSLGDRFYVEDMQWPSLTHRAKKTEISEKTGRYKRKKRFGKSVGNKAPAMLISILDQKLRSRGKPGVTKVPTSVRASQYNHISDDYHKKELGERWNDMQDGRRIQRDLYSAFLLQHIDTDNNNFDKPTLFRDYENFVLLHDQYIEELKKLPKTLASMGIVRKAS

SEQ ID NO: 2190 - protein, 540 aa, unidentified
  REGION 1..540: note = Category: MG81 effectors
  REGION 1..540: note = Description: MG81-469 effector
  source 1..540: note = uncultivated organism sequence
MATTDKKDEENLRAYKFRLDPNQAQTTALYQAVGAARYTYNMLTAYNLEVNRLRDDYWKRRHDEGISDADIKKELNALAKEDKRYKQLNYGAFGTQYLTPEKKRHEQAEHRIENGEDPSVVWNQETERSANPWLHTANQRVLVSGLQNASDAWDNFWASRTGKRAGRLVGTPRFKKKGVSRDSFTVPAPEKMGAYGTAYLRGEPAYKQGRRKITDYRHVRLSYLGTIRTFNSTKPLVKAVAAGAKIRRYTVSRNADRWYVSFLVKFSEPIRRSATKRARAAGSVGVDLGVKYLASLSDSEAPQRFPNLKFVEGLPSLENPRWSEASSRRLHKLQRALARSQKGSNRRSRLVKQIARLHHMTALRRESNLHQLTKKLATEYTLVGFEDLNVSGMTASAKGTVENPGKNVAQKSGLNRVVLDAAFGVFRNQLEYKAVWYGSAFEKVDRYFASSQTCSECGRKAKTKLTLRDRVFDCAYCGNMMDRDLNAAVNICREAQRLFDEKLASEDRESLNGRGSRGALRGAETVEASRPPASHRRGSP

SEQ ID NO: 2191 - protein, 529 aa, unidentified
  REGION 1..529: note = Category: MG81 effectors
  REGION 1..529: note = Description: MG81-470 effector
  source 1..529: note = uncultivated organism sequence
MILLAKKNNNDTDTCVLTLPLRVEKWQEDCLLKRFEAARRIYNSLLNFELKKLRQLERTVEYRQIQSVISSAYRSNTKDSPECKAALKRREKLIDENGLTKNGFKNDVKFFYKHFDGLIGSSVAVHCIAVQLWAAFDKYLRGSGKEIHFKRLGDISSLKGYSVKGKSGGCEIIFRGQYVEWTRKKKKLLLPLKIDPDNEYEREMLSRRVKYVRIIKKPGKNRLRWYAQLTLEGKPALKYSAETGKPIHSVGKGDVGIDIGPQTVAYASDKEVALLELADRVTNIEHQKKKLQRKLDRSRRATNPDNYKPDGTIKRGVKLTRNKSKRYLKLQSKLAYIQHRQAEIRKLQHTCLANHMLTLGDRFFVEKMNWPGLAHRAKETSISEKTGRYKRKKRFGKSLANKAPAMFISILKQKCETLGLPGVVEVDTFRLKASQYNHLSDTCEKKSLSERWNYMPISDGSDSSKTKRIQRDLYSAFLLQHTIPQSCSFDKEALRIDYPNFVTMHDAEIHRLESLPKTITSMGVRRSHS

SEQ ID NO: 2192 - protein, 522 aa, unidentified
  REGION 1..522: note = Category: MG81 effectors
  REGION 1..522: note = Description: MG81-471 effector
  source 1..522: note = uncultivated organism sequence
MKRSSTDTCCLTLPLKLEKWQSDRLEKRFEIGRQIYNTIVHAELKKLRKLERTQQYQEIEQKLENAKQEETKELWKKKRQLLDQNGLSENHFKADMKHYYPHFKDNIASSVAVHGIASQAWTAFEKVLLSKDGKMVHFKKKGELSSLRGYSQAGKSGGIEIIFRGSYVEWKGLKLPLKLSPDNDYETEMLSKRVKYVRILRKDGKTKTHWYAQLALEGKPAVKRDSISGAPKHPVGHGVVGIDIGTRTLAYSTDKEVNLLELADRVQNIEQEKRRLQRKMDRSRRAMNPGNYKPDGSIKQGVKLTWNNSKRYKRIQHQYAMIQHHQADIRKQQHNELANYLLTLGDCFFVENMSYCDLAHRANKTEISEKTGRYKRKKRFGKSIANKAPAMLITMLKQKCQSRGLEGVKEVDTHVCASQYNHQTDTCIKKALENRWNIMPDGERIQRDLYSAFLLQHCRRDLPEYNRKELQKEFGEELYRVFDREALQRDYPQFVAYHHMTIQRLSELPHTIPSMGIRRIIS

SEQ ID NO: 2193 - protein, 473 aa, unidentified
  REGION 1..473: note = Category: MG81 effectors
  REGION 1..473: note = Description: MG81-472 effector
  source 1..473: note = uncultivated organism sequence
MVHAELKKLRNIENSQPYRQIQKQIEALDWKNQTDKARLKSLYNERNQLLKASGFTEYGFKADIKYYYKHFNDNIGSSVAVHGIAPQVWAAFEKMLFHKEGKKVHYKKKDDIHSLRGYSVTGKSGGVEIIFRETYIEWKGLKLPLKRSPDNAYETEMLSRRVKYVRLLRKPGKRKNRWYVQLSLEGKPAIKRDPESGELRHAIGRGAVGLDIGPQTLAYSACGAVDLVELADQVQNIEQMKRRLQRKLDRSRRATNPNNYADNGTIRRGVKLTHNKSNRYRRTQRELRYLQHCQAEIRKRQHIELANHLLALGDCFYVEDMAWPSLTHRAKETAISEKTGRIKRKKRFGKSVANKAPATLIGILEQKCNSLGLPGVMKVPTSLRASQYNHQSGEYTSKPLSQRWNDIPDGERIQRDLYSAFLLQHYDPQAGNFNSALLQQDYPQFVQYHHRAIQRLSTAPKTLSSMGIQRSLR

SEQ ID NO: 2194 - protein, 511 aa, unidentified
  REGION 1..511: note = Category: MG81 effectors
  REGION 1..511: note = Description: MG81-473 effector
  source 1..511: note = uncultivated organism sequence
MREDSQNTCCLTLPLKIEKWQADRLIKRFEIARQIYNTLVHAELKKLQKMEASAEYRQIQDRIRELNPSDAGAKKEWKILKDKQEKLWKAWKITEYGFKSDIKAYYKYFNENIGAAGATHDIAPRVWAAFEKKLNDRTGKVKIQYKKAGDIRSLKGFSVSGKSGGTEIIFHKTYIAWKGLTLPLKLSPDNAYEKEMLMRRIKYVRILRKPGKHKDRWYAQLSLEGNPVVKLDPVSRLPRQPIGKGAVGIDIGPQTLAYSAEGGADLVELADQVQCIEQEKSRLQRKMDRSRRASNPDNYAQDGTIKRGVKLTHNKSRRYCKLQKELAYMLYRQAETRKRQHRELINRLLTMGDCFYIEDMHWNSLAHRAKKTEISEKTGRYKRKKRFGKSIANKAPAMLVDMLEQKCKSLELDVVTVNTSLKASQYNHQTGKYEKKTLSQRWNRMPDGEQIQRDLYSAFLLQHVVPEKNAFDNEALCRDYPKFVQYHHEVIERLRSLPKTISSMGIRQSVS

SEQ ID NO: 2195 - protein, 523 aa, unidentified
  REGION 1..523: note = Category: MG81 effectors
  REGION 1..523: note = Description: MG81-474 effector
  source 1..523: note = uncultivated organism sequence
MPTKQKEDSNRCVLTLPLLTEPWQEHIIEKRFKIIEHLKNQLISIELRKLKNLQRTKAYKNLIKQIESVPKSERTVLYKERNKMLKDAGFSQYTFMDDMAGKKSLMQKHFESHINVQIAHKAAIDVWSSFEKFLFGSGQMIHYQKRGTLKSIASKSPKNGMHYFPESNTFKWSGGRQKKIGQKGEQKKVSIKPISLCLRVSPLKTDYEKEMVANNEIKYYRVVRKWMKTKYKYYLQITFAGKPADKHREISTGRVGIDIGTQTIAIASDKSVKLLELADKVNKNHIKKCELQRKLDRSRRYTNPDNFNPDGTVKRGTKGHKLKWIKSKHYLEIAGKIRELERKNADIRKYQHTCLANDILAMGNQIYIEPMNYKGLQKRAKETQVDEKGRYKKKKRFGKSLANKAPAMFVTILKTKAEQHGGEVYEVDIMSYRASQCDHTTGEYTKHGLNDRWRILGNGDKVQRDLYSAFLIKNSNKTHDEIDLDKCSKTYDNFKKLHDKEIENIRNEVKLRERKNISSYGIA

SEQ ID NO: 2196 - protein, 512 aa, unidentified
  REGION 1..512: note = Category: MG81 effectors
  REGION 1..512: note = Description: MG81-475 effector
  source 1..512: note = uncultivated organism sequence
MPTKQKEDSNRCVLTLPLLTEPWQEHIIEKRFKIIEHLKYQLISIELRKLKKLQRTKAYKNLIKQIESVPKSERTALYKERNKMLKDAGFSQYTFMDDMAGKKSLMQKHFESHINVQIAHKAAIDVWSSFEKFLFGTGQMIHYQKRGTLSSVASKSPKTGMFYYSDENIFKWSGGGTKPKGGIILCLRVASVKTNYEKEMVANNEIKYYRVVRKWMKTKYKYYLQITFAGKPADKHREISTGRVGIDIGTQTIAIASDKSVKLLELADKINKNHIKKCELQRKLDRSRRYTNPDNFNPDGTVKRGTKGHKLKWNKSKHYIEIAGKIRELERKNADIRKYQHTCLANDILAMGNQIYIEPMNYKGLQKRAKETQVDEKGRYKKKKRFGKSLANKAPAMFVTILKTKAEQHGGEVYEVDIMSYRASQCDHTTGEYTKHGLNDRWRILGNGDKVQRDLYSAFLIKNSNKTHDEIDLDKCSKTYDSFKKLHDKEIENIRNEVKLRERKNISSYGIA

SEQ ID NO: 2197 - protein, 522 aa, unidentified
  REGION 1..522: note = Category: MG81 effectors
  REGION 1..522: note = Description: MG81-476 effector
  source 1..522: note = uncultivated organism sequence
MKKSSTDTCCLTLPLKLEKWQSDRLEKRFEIGRQIYNTVVRAELKKLHQVERTPQYREIEQKLKEAKQEEAKELWKKRTQLLSKSGFSEYGFKSDMKYYYQHFKENIGSSVAVHGIASQVWTAFEKVLFSKDGKMVHFKKKGELSSLRGYSQAGKSGGIEIIFRGSYVEWKGLKLPLKLSSNNDYETEMLSKRVKYVRILRKEGKTKPHWYAQLVLEGKPAIKRDPASGAPKHPVGHGVVGIDIGTRTLAYSADSKVDLIELADRVQNIELEKMLLQRKLDRSRRATNPENYKPDGTIKKGVKLTRNKSKRYRKIQHQLAMLQHRQADIRKRQHNELANYLLTLGDCFFVEDMDYRALTRKAKKTEISEKTGRYKRKKRFGKSIANKAPSMLIALLDQKCKSLNLEGVKKVDTAVKASQYNHQTDECKAKELKERWNIMPDGERIQRDLYSAFLLQHCKRGLPEYNRKKLQEAFGNELYRVFDREALQRDYPKFVEYHRETIQRLSALPKTIPSMGIRRIIS

SEQ ID NO: 2198 - protein, 538 aa, unidentified
  REGION 1..538: note = Category: MG81 effectors
  REGION 1..538: note = Description: MG81-477 effector
  source 1..538: note = uncultivated organism sequence
MNNEEKEKEGATCCLTLPLKLEKWQSDHLEKRFEIARQLYNTLVHAELKKKCQVERMPEYQEIMKMIDAASNQKEKWALEKKRKAFLEENGFSRNAFKADMEKYYKHFNDNIGANVALHGITAQVWIAFDKVFVDNYKQKGKVHFKKPGELCSVQGYSQKKSGGKEIMFREDRIIWNQQGNRDRKKVKREFLLKLSPDNPYEAEMLKRHVKFVRILRKDGKTKPHWYAQLVLEGKPAVKRDPASGAPKHPIGHGVVGIDIGTRTLAYSTDSEVNLLELADRVQNIEQEKRRLQRKMDRSRRAMNPGNYKPDGSIKQGVKLTWNNSKRYKRIQHQYAMIQHHQADIRKQQHNELANYLLTLGDCFFVENMSYCDLAHRANKTEISEKTGRYKRKKRFGKSIANKAPAMLITMLKQKCQSRGLEGVKEVDTHVCASQYNHQTDTCIKKALENRWNIMPDGERIQRDLYSAFLLQHCRRDLPEYNRKELQKEFGEELYRVFDREALQRDYPQFVAYHHMTIQRLSELPHTIPSMGIRRIIS

SEQ ID NO: 2199 - protein, 528 aa, unidentified
  REGION 1..528: note = Category: MG81 effectors
  REGION 1..528: note = Description: MG81-478 effector
  source 1..528: note = uncultivated organism sequence
MAKKNNNNNDTDTCVLTLPLRVEKWQEDCLLKRFEAARRIYNSLLNFELKKLRQLERTVEYRQIQSVISSAYRSNTKDSLECKDAFKHREKLISANGISKNGFKSDVKFFYKHFDGLIGSSVAVHCIAVQLWAAFDKYLSGSGKEIHFKRLGDISSLKGYSVKGKSGGREIIFRGQYIEWTRKKKKLLLPLKIDPDNEYEREMLSRRVKYVRIIKKPGKNRLRWYAQLTLEGKPALKYSAGTGKPIHSVGKGDVGIDIGPQTVAYASDKEVALLELADRVTNIEHQKKKLQRKLDRSRRATNPDNYKPDGTIKRGVKLTRNKSKRYLKLQSKLAYIQHRQAEIRKLQHTCLANHMLTLGDRFFVEKMNWPGLAHRAKETSISEKTGRYKRKKRFGKSLANKAPAMFISILKRKCETLGLPGVVEVDTYSLKASQYNHLSDTYEKKSLSERWNYMPISDGSDSSKTKRIQRDLYSAFLLQHTIPQPCSFDKEALRIDYPNFVTMHDAEIHRLESLPKTVTSMGVRRSHS

SEQ ID NO: 2200 - protein, 1355 aa, unidentified
  REGION 1..1355: note = Category: MG81 effectors
  REGION 1..1355: note = Description: MG81-479 effector
  source 1..1355: note = uncultivated organism sequence
MKISKIKNSRPGISVAENKNEEPLSRQSLLYYAPVKDGKIRLESKDLEQHVTECNEKAQKLYNVITPEINFYRDENRQKMVENLAKNFNAVINNALRSIRNPKEKKEQRVEKEVAFILNLSKKSIKMKKDVFVKSTDLIVKFPENNKYNKKNDKGTGSKEADIQRIISDLVLRKLKKTLRKEVKLENGYRMQMTEITISLMSAICLYGNAESFDPAILKAFFEKVDSDYTKYKYVEQIVKSIESQSAKLKVIEKDGRHLLISANADHRKKKYVFEFMRMYAAADEKEKRELTEHIQDLIGLYLCGKAGYENAENRFSDMIESHNCICGKIEEILNELEKPENLSQQKKENLKNTTVKVMALKYRAAVNYLADEVGKTVLGEIREKKVRSCADLYWIEYIDSTVEKLLLKSRNKKRYRYEIGFLSKHIWKEWTQYISGKYIEIGKGVYHFAIPDLSGALEGESVSICEVKPEYRNGVSGFDYERIRAEESLEREMEKYVLFAVNNFARAVTPEEEREKSGHEDVLLMKTLSEIEESQTKEERQKKHDNNVKNAITLYADADRRILQFFGGQSRFREKEDSLINLYSGEDLYKEIRKELYAIRNITFHYTTKAEKDQTQKHDLAEYLFEEEFSDITELFREKYYANNVWKYYDAEVINTIMENIYCGRKYRAAQVPAFKNIISRPELPQVMNGFVKGNSLRRLMNCPDRDVINKYWSALFFVLKELYYYDFLQEQKKPEDNVKERFFRAIKKLSGQEKDDEKQKAWESFGNRIDQIGRDRSFGAICQGLMIEYMLQNSDISMVQTETDNGKANNKKQIYKHYRTLLYNCISEAFIEYLREKWKELRTPVLTAKEWSKEEFCRVDGLKHLSLFDHLKETFNDAESGSSWYMAAHFINQKYLNHLLGSIRNYLQFTEDIEDRAISLGDCVDNKREEKNLRYRNTLEILEFVAQFCERTTNVMEDYFESNQEYAEYLSDFVDYNTTKKETDIEKALYSFCKQKFKVDGKEYMAGIYYDGENLIPNRNIIRANMYGNTSCLKPCMDRITLKEIRTMYADQNKLDLVLKEGVCHTEEEQKAYREYQNEKNRIELFDVCTYTQILNDMQARLIGWSYMRERDLMYYQLGYYYTKLFWTDSISEEDARRRLVGNLVNVEDGAILYQILAFNSYNLPIIANKNNTVTLLKDEGSIGGKAITAFLKNYENAEMIYKEALDLFENMDEHAAIINTRNYIEHFKYFIKSDRSMMDLYSEIYDRFFRHDHNRKKNVPDSLKNVLADNFMIVDIDMELGSKKVGEKKKGFREHKAARIEFTDSGIRSTDMTYTIKPDIKDNKKVLVPARSEVFLKQFRKILEYRIQDKTQ

SEQ ID NO: 2201 - protein, 528 aa, unidentified
  REGION 1..528: note = Category: MG81 effectors
  REGION 1..528: note = Description: MG81-480 effector
  source 1..528: note = uncultivated organism sequence
MILLAKNNNNTDTCVLTLPLRVEKWQEDCLLKRFEAARRIYNSLLNFELKKLRQLERTVEYRQIQSVISSAYRSNTKDSPECKDAFKRREKLISANGISEYGFKSDVKFFYKHFDGLIGSNVAVHCIAVQLWAAFDKYLRGSGKEIHFKRLGDISSLKGYSVKGKSGGCEIIFRGQYVEWTRKKKKLLLPLKIDPDNEYEREMLSRRVKYVRIIKKPGKNRLRWYAQLTLEGKPALKYSAETGKPIHSVGKGNVGIDIGPQTVAYASDKEVALLELADRVTNIEHQKKKLQRKLDRSRRATNPDNYKPDGTIKRGVKLTRNKSKRYLKLQSKLAYIQHRQAEIRKLQHTCLANHMLTLGDRFFVEKMNWPGLAHRAKETSISEKTGRYKRKKRFGKSLANKAPAMFISILKRKCETLGLPGVVEVDTYSLKASQYNHLSDTYEKKSLSERWNYMPISDGSDSSKTKRIQRDLYSAFLLQHTIPQPCSFDKKALRIDYPNFVTMHDAEIHRLESLPKTITSMGVRRSHS

SEQ ID NO: 2202 - protein, 529 aa, unidentified
  REGION 1..529: note = Category: MG81 effectors
  REGION 1..529: note = Description: MG81-481 effector
  source 1..529: note = uncultivated organism sequence
MILLANNNNNNTDTCVLTLPLRVEKWQEDCLLKRFEAARRIYNSLLNFELKKLRQLERTVEYRQIQSVISNAYRSNTKDSPECKAALKRREKLIDENGLTKNGFKNDVKFFYKHFDGLIGSSVAVHCIAVQLWAAFNKYLCGNGKEIHFKRLGDISSLKGYSVKGKSGGCEIIFRGQYVEWTRKKKKLLLPLKIDPDNEYEREMLSRRVKYVRIIKKPGKNRLRWYAQLTLEGKPALKYSAETGKPIHSVGKGDVGIDIGPQTVAYASDKEVALLELADRVTNIEHQKKKLQRKLDRSRRATNPDNYKPDGTIKRGVKLTRNKSKRYLKLQSKLAYIQHRQAEIRKLQHTCLANHMLTLGDRFFVEKMNWPGLAHRAKETSISEKTGRYKRKKRFGKSLANKAPAMFISILKQKCETLGLPGVVEVDTFRLKASQYNHLSDTCEKKSLSERWNYMPISDGSDSSKTKRIQRDLYSAFLLQHTIPQSCSFDKEALRIDYPNFVTMHDAEIHRLESLPKTITSMGVRRSHS

SEQ ID NO: 2203 - protein, 318 aa, unidentified
  REGION 1..318: note = Category: MG81 effectors
  REGION 1..318: note = Description: MG81-482 effector
  source 1..318: note = uncultivated organism sequence
MLSKKIKYLRIVKKWVKTRYKYYLQFALEGKPVKKDRIVNKGNVGIDIGTQTVAISSADSVKILELADKIDKNHTKKKILQRKMDRSRRYTNPQNYNEDGTIKKPPKGQRFSWYKSKKYIQLAGKVRELERKNADIRKYQHTCLANWILSLGDTVYVEQMNFSGLQRRAKETKIDKNGKYAKKKRYGKSLANKAPSMFLTILGSKLNQYGGQLNKINTYEFKASQYDHTDDTFTKHNRSERWHILSNGDKNQRDLYSAFLIMNSDISLKHCNRKKCNETYSNFKVLQDKEIERLYSDIRKGNCKNISSFGFQRNAKAM

SEQ ID NO: 2204 - protein, 535 aa, unidentified
  REGION 1..535: note = Category: MG81 effectors
  REGION 1..535: note = Description: MG81-483 effector
  source 1..535: note = uncultivated organism sequence
MILLANNNNNNNNNNNNTDTCVLTLPLRVEKWQEDCLLKRFEAARRIYNSLLNFELKKLRQLERTVEYRQIQSVISSAYRSNTKDSPECKDAFKRREKLISANGISEYGFKSDVKFFYKHFDGLIGSNVAVHCIAVQLWAAFDKYLRGSGKEIHFKRLGDISSLKGYSVKGKSGGCEIIFRGQYIEWTRKKKKLLLPLKIDPDNEYEREMLSRRVKYVRIIKKPGKNRLRWYAQLTLEGKPALKYSAETGKPIHSVGKGNVGIDIGPQTVAYASDKEVALLELADRVTNIEHQKKKLQRKLDRSRRATNPDNYKPDGTIKRGVKLTRNKSKRYLKLQSKLAYIQHRQAEIRKLQHTCLANHMLTLGDRFFVEKMNWPGLAHRAKETSISEKTGRYKRKKRFGKSLANKAPAMFISILKRKCETLGLPGVVEVDTYSLKASQYNHLSDTYEKKSLSERWNYMPISDGSDSSKTKRIQRDLYSAFLLQHTIPQPCSFDKKALRIDYPNFVTMHDAEIHRLESLPKTITSMGVRRSHS

SEQ ID NO: 2205 - protein, 508 aa, unidentified
  REGION 1..508: note = Category: MG81 effectors
  REGION 1..508: note = Description: MG81-484 effector
  source 1..508: note = uncultivated organism sequence
MADKECCVLTLPLQTEIWQEHIIEKRFAIMEHLKNQLIAKELRRLKNLERTKEYRNLIDEINNTPKEKRKALFSKRRKLLKDSGFSEYDFKDDIAGKNSLMQKHFIEHIATQIAHKLASDVWRSFDKFLFGNGRFIHFSKRGSLRSVASQKNGNGMTYKNGYFIWNGGQSKNKIILKIKVTPPKNEYEKEMLSKKIKYLRIVKKWVKTRYKYYLQFALEGKPVKKDRIVNKGNVGIDIGTQTVAISSANSVKILELADKIDKNHTKKKILQRKMDRSRRYTNPQNYNEDGTIKKPPKGQRFSWYKSKKYIQLAGKVRELERKNADIRKYQHTCLANWILSLGDTVYVEQMNFSGLQRRAKETKIDKNGKYAKKKRYGKSLANKAPSMFLTILESKLNQYGGQLNKINTYEFKASQYDHTDDTFTKHNRSERWHILSNGDKNQRDLYSAFLIMNSDISLKHCNREKCNETYSNFKVLQDKEIERLYSDIRKGNCKNISSFGFQRNAKAM

SEQ ID NO: 2206 - protein, 496 aa, unidentified
  REGION 1..496: note = Category: MG81 effectors
  REGION 1..496: note = Description: MG81-485 effector
  source 1..496: note = uncultivated organism sequence
MAKNEQNCCVLTLPLLTEPWQEHIIETRFRIMEQLKNALIAKELGKLNNLKRTREWKRLMKSIQDAKDEKEKKQLFKKRTELLRNVGFSDFSFSNDVTNLKIHKHFAEHINSGIAQRAGKDVWRAFEKYLFSNGKTVHFHRRGTLDSVANRYAREGMMIDGDILTWKGGQSDHQIVLKIRIRRLKNAYEREMLQKTVRNLRIVRKWMKTRYKYYLQITLQGDPASKYRSVGKGRIGIDIGTQTIAWSSPTEVRLAELAAGIKRNHAEKTALQRKMDRSRRTANPQNYNPDGTIRRGVKLRWVKTKHYLRMEGRVRELERKNADIRQYEHICMANHILSLGNEVYIEDMSFKGLQGRAKETKLDKNGRFARKKRFGKSLANRAPSMFVTILENKLKASGGSLHKVNTRTFRASQYDHTADEFKKKTLGQRWNHLKNGDKIQRDLYSAFLLMNAAPSLEEPDKKLCGKTYPQFNRLHDAEMERLRAEEKPHLSSMGIH

SEQ ID NO: 2207 - protein, 527 aa, unidentified
  REGION 1..527: note = Category: MG81 effectors
  REGION 1..527: note = Description: MG81-486 effector
  source 1..527: note = uncultivated organism sequence
MAKNNNNNDTDTCVLTLPLRVEKWQEDCLLKRFEAARRIYNSLLNFELKKLRQLERTVEYRQIQSVISSAYRSNTKDSPECKDAFKRREKLISANGISENGFKSDVKFFYKHFDGLIGSSVAVHCIAVQLWAAFDKYLSGSGKEIHFKRLGDISSLKGYSVKGKSGGGEIIFRGQYVEWTRKKKKLLLPLKIDPDNEYEREMLSRRVKYVRIIKKPGKNRLRWYAQLTLEGKPALKYSAETGKPIHSVGKGNVGIDIGPQTVAYASDKEVALLELADRVTNIEHQKKKLQRKLDRSRRATNPDNYKPDGTIKRGVKLTRNKSKRYLKLQSKLAYIQHRQAEIRKLQHTCLANHMLTLGDCFFVEKMNWPGLAHRAKETSISEKTGRYKRKKRFGKSLANKAPAMFISILKRKCETLGLPGVVEVDTFRLRASQYNHLSDTYEKKSLSERWNYMPISDGSDSSKTKRIQRDLYSAFLLQHTIPQPCSFDKEALRIDYPNFVIMHDAEIHRLESLPKTITSMGVRRSHS

SEQ ID NO: 2208 - protein, 511 aa, unidentified
  REGION 1..511: note = Category: MG81 effectors
  REGION 1..511: note = Description: MG81-487 effector
  source 1..511: note = uncultivated organism sequence
MAARSKTDTCCLTLPLRLEKWQADRLAKRFHIAEQIYNAMLLSWIKKLRVVEQMPEYRAIQSQLQKLYEEDKQKTDAAKELFSRRKEILKKNGFPEYSFKTGIRKYYAHFKENIASNVATHCIASQVWDAFSKKLFGNGGRLHFKRAGDIHSLRGYSKSGESGGVEIIFRGTYIEWNGLRLPLKLDPQNPYEAEMLAKRVKYVRILRTPGKSIDHWYAQLALEGKPTVKRNAATGEPVHPSGRGAVGIDIGPRTIAYVSENEVGLRELADQVENIERDKRRLQRKLDRSRRATNPDNYAPDGTIKRGIKHTHNKSSRYRRMQKELSLLQHRQALIRKRQHTELANHLLSLGDCFYVEDMPWKGLARRTKETTVSPTTGRYRRKKRFGKSISNKAPGTLILILEQKCKSRGVSGVIRVPTNIKASQYNHMTDTYKPKPLSQRWNDMPDGKRIQRDLYSAFLLQHVTPELDGFERTKLIEDYDGFIHLHDKEIHELTLAPKTIASMGISRTRS

SEQ ID NO: 2209 - protein, 511 aa, unidentified
  REGION 1..511: note = Category: MG81 effectors
  REGION 1..511: note = Description: MG81-488 effector
  source 1..511: note = uncultivated organism sequence
MAKCSTDTCCLTLPLRLEKWQEDRLAKRFEIARQIYNTMVRAELKKLRAIEQSEPYKANQEKIQALDWKTQTDKQALKALYKERDKLLQDGGFSERGFKSDIKNYYKHFNNNIGSNVAVHGIAPQVWAAFEKMLFKKEGKKVHFKKKGDIRSLRGYSITRKSGGVEIIFRETYIEWKGLKLPLKLSPDNSYETQMLSYRVKYVRLLRKPGKRKDRWYAQLSLEGKPVIKYNPKTGEVRHPIGKGAVGLDIGPQTLAYSAATGADLVELANQVQNVEQEKRRLQRKLDRSRRATNPGNYADDGTIRRGIALTHNKSKRYLRTQQELKYLQHQQAEIRKRQHTELANHLLSLGDCFYVEKMVWTSLTHRAKETEISEKTGKIKRKKRFGKSVANKAPATLIGILQRKSAALGIPGVIEVPTSVKASQYNHQSGTYTPKPLSQRWNNMPDGERIQRDLYSAFLLQHYDPQTNTFDANSLHQDYPQFVQYHHDAVLRLYAMPKTPSSMGIKRSLR

SEQ ID NO: 2210 - protein, 511 aa, unidentified
  REGION 1..511: note = Category: MG81 effectors
  REGION 1..511: note = Description: MG81-489 effector
  source 1..511: note = uncultivated organism sequence
MARCTTPTCVLTLPSHLEKWQEDRLAKRFEIAQKIYNALLGAELKKLRRLEQTPKYRAIKKDLAALYGDKEKNADRIRALYKKRNKLLKDNSFTEYGFTVDAKLYYKPFRTNIGSCVAVHCIAPQVWSAFEKYLFGNGKRIHFKRPGEIYSLRGYSSKTSSGVEIIYRGDHIEWNKLRLPLKLDLGNQYEEEMLTNRVKYVRILRRPGKNRDHWYAQLTLEGLPAIKRDDETGDPVHSIGNGPVGIDIGPQTIAYSSSKEAGLLELADRVQNIENKKCRIQRKMDRSRRAANPGNYNPDGTIKRGVPLTRNKSKRYLRLQNELAWIQHQQAAIRKEQHVALANYLLTLGDCFYIEDMNWQGLARRAKETAIPEPEKERKCRRKKRFGKSIANKAPATLVTILKNKCTSLGLPGVIPISTKVRASQYNHLTDSYQKKELSQRWNEMPDGRKIQRDLYSAFLLQHMNSQLDGFDRASLLRDYESFVSLHDQAILRAAAVPKLISSMGIKRTAN

SEQ ID NO: 2211 - protein, 426 aa, unidentified
  REGION 1..426: note = Category: MG81 effectors
  REGION 1..426: note = Description: MG81-490 effector
  source 1..426: note = uncultivated organism sequence
MIHISAKYGVDSIFALSKAEDIWRAVEQCLYGDGRTLHFTKYGKLPGIRAKQINRGIRFTVKDNHLCFKLRKIAFGIKINDRFQHDEITAVLSYLNDPEAADRRAVDVFINDGSCIDTYRPCYATLVPKMIRGKYRVYLYLTIEGKAKLKYDRFGNHRHQYGTGMIGADIGIQTVAYTSDTEVGLKNLSERGNSIQHSERKERLLNRAMFRSRQATNPQNFNCNGSVKKGAKNWKYSKHYKKLKYKYSELCRINAINRRLAINEDANHLRSLGDIFVTEPQNVRKLMRRAKKTTRDKNGRFNKKKRFGKSIRCRCPAGFQRTVAKKFVNTGGTYIEVPYNYRASQYDHTADDYIKKKLSARMYKLQDGTKVQRDWYSSFLLYCYNPHTNAIDKTKCAAAFTTQYHKEKTLIEQIKKRKIKVLNSGI

SEQ ID NO: 2212 - protein, 540 aa, unidentified
  REGION 1..540: note = Category: MG81 effectors
  REGION 1..540: note = Description: MG81-491 effector
  source 1..540: note = uncultivated organism sequence
MATTDKKDEENLRAYKFRLDPNQAQTTALYQAVGAARYTYNMLTAYNLEVNRLRDDYWKRRHDEGISDADIKKELNALAKEDKRYKQLNYGAFGTQYLTPEKKRHEQAEHRIENGEDPSVVWNQETERSANPWLHTANQRVLVSGLQNASDAWDNFWASRTGKRAGRLVGTPRFKKKGISRDSFTVPAPEKMGAYGTAYLRGEPAYKQGRRKITDYRHVRLSYLGTIRTFNSTKPLVKAVAAGAKIRRYTVSRNADRWYVSFLVKFSEPIRRSATKRARAAGSVGVDLGVKYLASLSDSEAPQRFPNLKFVEGLPSLENPRWSEASSRRLHKLQRALARSQKGSNRRSRLVKQIARLHHMTALRRESNLHQLTKKLATEYTLVGFEDLNVSGMTASAKGTVENPGKNVAQKSGLNRVVLDAAFGVFRNQLEYKAVWYGSAFEKVDRYFASSQTCSECGRKAKTKLTLRDRVFDCAYCGNMMDRDLNAAVNICREAQRLFDEKLASEDRESLNGRGSRGALRGAETVEASRPPASHRRGSP

SEQ ID NO: 2213 - protein, 511 aa, unidentified
  REGION 1..511: note = Category: MG81 effectors
  REGION 1..511: note = Description: MG81-492 effector
  source 1..511: note = uncultivated organism sequence
MAKCSTDTCCLTLPLRLEKWQEDRLAKRFEIARQIYNTMVRAELKKLRAMEQSKPYKANQEKIQALDWKTQADKQALKALYKERDKLLRDGGFSEYGFKSDIKNYYKHFNNNIGSSVAVHGIAPQVWAAFEKMLFKKEGKKVHFKKKGDIHSLRGYSAAGKSGGVEIIFRETYIEWKGLKLPLKLSPDNIYETQMLSYRVKYVRLLRKPGKRKDRWYAQLSLEGKPVIKYNPKTGEVRHPIGKGAVGLDIGPQTLAYSAATGADLVELANQVQNVEQEKRRLQRKLDRSRRATNPGNYADDGTIRRGIALTHNKSKRYLRTQQELKYLQHQQAEIRKRQHTELANHLLSLGDCFYVEKMVWTSLTHRAKETEISEKTGKIKRKKRFGKSVANKAPATLIGILQRKSAALGIPGVIEVPTSVKASQYNHQSGTYTPKPLSQRWNNMPDGERIQRDLYSAFLLQHYDPQTNTFDANSLHQDYPQFVQYHHDAVLRLYAMPKTPSSMGIKRSLR

SEQ ID NO: 2214 - protein, 511 aa, unidentified
  REGION 1..511: note = Category: MG81 effectors
  REGION 1..511: note = Description: MG81-493 effector
  source 1..511: note = uncultivated organism sequence
MAKCSTDTCCLTLPLRLEKWQEDRLAKRFEIARQIYNTMVRAELKKLRAMEQSEPYKANQEKIQALDWKTQTDKQALKALYKERDKLLRDGGFSEYGFKSDIKNYYKHFNNNIGSNVAFHGIAPQVWAAFEKMLFKKEGQKVHFKKKGDIHSLRGYSAAGKSGGVEIIFRETYIEWKGLKLPLKLSPDNIYETQMLSYRVKYVRLLRKPGKRKDRWYAQLSLEGKPVIKYNPKTGEVRHPIGKGAVGLDIGPQTLAYSAATGADLVELANQVQNVEQEKRRLQRKLDRSRRATNPGNYADDGTIRRGIALTHNKSKRYLRTQQELKYLQHQQAEIRKRQHTELANHLLSLGDCFYVEKMVWTSLTHRAKETEISEKTGKIKRKKRFGKSVANKAPATLIGILQRKSAALGIPGVIEVPTSVKASQYNHQSGTYTPKPLSQRWNNMPDGERIQRDLYSAFLLQHYDPQTNTFDANSLHQDHPQFVQYHHDAVLRLYAMPKTPSSMGIKRSLR

SEQ ID NO: 2215 - protein, 511 aa, unidentified
  REGION 1..511: note = Category: MG81 effectors
  REGION 1..511: note = Description: MG81-494 effector
  source 1..511: note = uncultivated organism sequence
MREDSQNTCCLTLPLKIEKWQADRLIKRFEIARQIYNTLVHAELKKLQKMEASAEYRKIQDRIRELNPSDVRAKKEWKILKDKQEKLWKAWKITEYGFKSDIKAYYKYFNENIGSAVATHDIAPRVWAAFEKKLNDRTGKVKIQYKKAGDIRSLKGFSVSGKSGGTEIIFHKTYIAWKGLTLPLKLSPDNAYEKEMLMRRIKYVRILRKPGKHKDRWYAQLSLEGNPVVKLDPVSGLPRHPIGKGAVGIDIGPQTLAYSAEGGADLVELADQVQCIEQEKSRLQRKMDRSRRASNPDNYAQDGTIKRGVKLTHNKSRRYCKLQKELAYMLYRQAETRKRQHRELINRLLTMGDCFYIEDMHWNSLAHRAKKTEISEKTGRYKRKKRFGKSIANKAPAMLVDMLKQKCKSLELDVVMVNTSLKASQYNHQTGKYEKKTLSQRWNRMPDGEQIQRDLYSAFLLQHVVPEKNAFDNEALCRDYPKFVQYHHEVIERLRSLPKTISSMGIRRSVS

SEQ ID NO: 2216 - protein, 511 aa, unidentified
  REGION 1..511: note = Category: MG81 effectors
  REGION 1..511: note = Description: MG81-495 effector
  source 1..511: note = uncultivated organism sequence
MAKCSTDTCCLTLPLRLEKWQEDRLAKRFEIARQIYNTMVRAELKKLRAMEQSEPYKANQEKIQALDWKTQADKQTLKALYKERDKLLQDGGFSERGFKSDIKNYYKHFNNNIGSNVAVHGIAPQVWAAFEKMLFKKEGKKVHFKKKGDIRSLRGYSVTGRSGGVEIIFRETYIEWKGLKLPLKLSPDNIYETQMLSYRVKYVRLLRKPGKRKDRWHAQLSLEGKPVIKYNPKTGEVRHPIGKGAVGLDIGPQTLAYSAATGADLVELANQVQNVEQEKRRLQRKLDRSRRATNPGNYADDGTIRRGIALTHNQSKRYLRTQQELKYLQHQQAEIRKRQHTELANHLLSLGDCFYVEKMVWTSLTHRAKETEISEKTGKIKRKKRFGKSVANKAPATLIGILQRKSAALGIPGVIEVPTSVKASQYNHQSGTYTPKPLSQRWNNMPDGERIQRDLYSAFLLQHYDPQTNTFDANSLHQDYPQFVQYHHDAVLRLYAMPKTPSSMGIKKSLR

SEQ ID NO: 2217 - protein, 540 aa, unidentified
  REGION 1..540: note = Category: MG81 effectors
  REGION 1..540: note = Description: MG81-496 effector
  source 1..540: note = uncultivated organism sequence
MMYNTKYQAKRGDPVGEKNSNDTDTCVLTLPLRVEKWQEDCLLKRFEAARRIYNSLLNFELKKLRQLERTVEYRQIQSVISSAYLSNTKDSLECKNAFKRREKLISANGISENGFKSDVKFFYKHFDGLIGSSVAVHCIAVQLWAAFDKYLSGSGKEIHFKRLGDISSLKGYSVKGKSGGLEIIFRGQYVEWTRKKKKLLLPLKIDPDNEYEREMLSRRVKYVRIIKKPGKNRLRWYAQLTLEGKPALKYSAGTGKPIHSVGKGNVGIDIGPQTVAYASDKEVALLELADRVTNIEHQKKKLQRKLDRSRRATNPDNYKPDGTIKRGVKLTRNKSKRYLKLQSKLAYIQHRQAEIRKLQHTCLANHMLTLGDRFFVEKMNWPGLAHRAKETSISEKTGRYKRKKRFGKSLANKAPAMFISILKRKCETLGLPGVVEVDTYNLKASQYNHLSDTYEKKSLSERWNYMPISDGSDSSKTKRIQRDLYSAFLLQHTIPQPCSFDKEALRIDYPNFVTMHDAEIHRLESLPKTITSMGVRRSHS

SEQ ID NO: 2218 - protein, 529 aa, unidentified
  REGION 1..529: note = Category: MG81 effectors
  REGION 1..529: note = Description: MG81-497 effector
  source 1..529: note = uncultivated organism sequence
MILLAKKNNNDTDTCVLTLPLRVEKWQEDCLLKRFEAARRIYNSLLNFELKKLRQLERTVEYRQIQSVISSAYRSNTKDSPECKDAFKRRKKLTDENGISEYGFKSDVKFFYKHFDGLIGSSVAVHCIAVQLWAAFDKYLRGNGKEIHFKRLGDISSLKGYSVRGKSGGCEIIFRGQYVEWTRKKKKLLLPLKIDPDNEYEREMLSRRVKYVRIIKKPGKNRLRWYAQLTLEGKPALKYSAETGKPIHSVGKGDVGIDIGPQTVAYASDKEVALLELADRVTNIEHQKKKLQRKLDRSRRATNPDNYKPDGTIKRGVKLTRNKSKRYLKLQSKLAYIQHRQAEIRKLQHTCLANHMLTLGDRFFVEKMNWPGLAHRAKETSISEKTGRYKRKKRFGKSLANKAPAMFISILKRKCETLGLPGVVEVDTYNLKASQYNHLSDTYEKKSLSERWNYMPISDGSDSSKTKRIQRDLYSAFLLQHTIPQPCSFDKEALRIDYPNFVTMHDAEIHRLESLPKTVTSMGVRRSHS

SEQ ID NO: 2219 - protein, 528 aa, unidentified
  REGION 1..528: note = Category: MG81 effectors
  REGION 1..528: note = Description: MG81-498 effector
  source 1..528: note = uncultivated organism sequence
MAKNNNNNNNTDTCVLTLPLRVEKWQEDCLLKRFEAARRIYNSLLNFELKKLRQLERTVEYRQIQSVISSAYRSNTKDSPECKDAFKRREKLISANGISENGFKSDVKFFYKHFDGLIGSNVAVHCIAVQLWAAFDKYLSGSGKEIHFKRLGDISSLKGYSVKGKSGGGEIIFRGQYVEWTRKKKKLLLPLKIDPDNEYEREMLSRRVKYVRIIKKPGKNRLRWYAQLTLEGKPALKYSAETGKPIHSVGKGNVGIDIGPQTVAYASDKEVALLELADRVTNIEHQKKKLQRKLDRSRRATNPDNYKPDGTIKCGVKLTRNKSKRYLKLQSKLAYIQHRQAEIRKLQHTCLANHMLTLGDRFFVEKMNWPGLAHRAKETSISEKTGRYKRKKRFGKSLANKAPAMFISILKRKCETLGLPGVVEVDTFRLRASQYNHLSDTYEKKSLSERWNYMPISDGSDSSKTKRIQRDLYSAFLLQHTIPQPCSFDKEALRIDYPNFVIMHDAEIHRLESLPKTITSMGVRRSHS

SEQ ID NO: 2220 - protein, 511 aa, unidentified
  REGION 1..511: note = Category: MG81 effectors
  REGION 1..511: note = Description: MG81-499 effector
  source 1..511: note = uncultivated organism sequence
MAKCSTDTCCLTLPLRLEKWQEDRLAKRFEIARQIYNTMVRAELKKLRAMEQSEPYKANQEKIQALDWKTQTDKQALKALYKERDKLLRDGGFSEYGFKSDIKNYYKHFNNNIGSNVAFHGIAPQVWAAFEKMLFKKEGKKVHFKKKGDIHSLRGYSAAGKSSGVEIIFRETYIEWKGLKLPLKLSPDNIYETQMLSYRVKYVRLLRKPGKRKDRWYAQLSLEGKPVIKYNPKTGEVRHPIGKGAVGLDIGPQTLAYSAATGADLVELANQVQNVEQEKRRLQRKLDRSRRATNPGNYADDGTIRRGIALTHNKSKRYLRTQQELKYLQHQQAEIRKRQHTELANHLLSLGDCFYVEKMVWTSLTHRAKETEISEKTGKIKRKKRFGKSVANKAPATLIGILQRKSAALGIPGVIEVPTSVKASQYNHQSGTYTPKPLSQRWNNMPDGERIQRDLYSAFLLQHYDPQTNTFDANSLHQDYPQFVQYHHDAVLRLYAMPKTPSSMGIKRSLR

SEQ ID NO: 2221 - protein, 525 aa, unidentified
  REGION 1..525: note = Category: MG81 effectors
  REGION 1..525: note = Description: MG81-500 effector
  source 1..525: note = uncultivated organism sequence
MANNNNNTDTCVLTLPLRVEKWQEDCLLKRFEAARRIYNSLLNFELKKLRQLERTVEYRQIQSVISSAYRSNTKDSPECKAALKRREKLIDENGLTKNGFKNDVKFFYKHFDGLIGSSVAVHCIAVQLWAAFNKYLCGNGKEIHFKRLGDISSLKGYSVKGKSGGCEIIFRGQYVEWTRKKKKLLLPLKIDPDNEYEREMLSRRVKYVRIIKKPGKNRLRWYAQLTLEGKPALKYSAETGKPIHSVGKGDVGIDIGPQTVAYASDKEVALLELADRVTNIEHQKKKLQRKLDRSRRATNPDNYKPDGTIKRGVKLTRNKSKRYLKLQSKLAYIQHRQAEIRKLQHTCLANHMLTLGDRFFVEKMNWPGLAHRAKETSISEKTGRYKRKKRFGKSLANKAPAMFISILKQKCETLGLPGVVEVDTFRLKASQYNHLSDTCEKKSLSERWNYMPISDGSDSSKTKRIQRDLYSAFLLQHTIPQSCSFDKEALRIDYPNFVTMHDAEIHRLESLPKTVTSMGVRRSHS

SEQ ID NO: 2222 - protein, 511 aa, unidentified
  REGION 1..511: note = Category: MG81 effectors
  REGION 1..511: note = Description: MG81-501 effector
  source 1..511: note = uncultivated organism sequence
MREDSQNTCCLTLPLKIEKWQADRLIKRFEIARQIYNTLVHAELKKLQKMEASAEYRQIQDRIRELNPSDVRAKKEWKILKDKQEKLWKAWKITEYGFKSDIKAYYKYFNENIGSAVATHDIAPRVWAAFEKKLNDRTGKVKIQYKKAGDIRSLKGFSVSGKSGGTEIIFHKTYIAWKGLTLPLKLSPDNAYEKEMLMRRIKYVRILRKPGKHKDRWYAQLSLEGNPVVKLDPVSGLPRHPIGKGAVGIDIGPRTLAYSAEGGADLVELADQVQCIEQEKSRLQRKMDRSRRASNPDNYAQDGTIKRGVKLTHNKSRRYCKLQKELAYMLYRQAETRKRQHRELINRFLTMGDCFYIEDMHWNSLAHRAKKTEISEKTGRYKRKKRFGKSIANKAPAMLVDMLKQKCKSLELDVVMVNTSLKASQYNHQTGKYEKKTLSQRWNHMPDGEQIQRDLYSAFLLQHVVPEKNAFDNEALCRDYPKFVQYHHEVIERLRPLPKTISSMGIRRSVS

SEQ ID NO: 2223 - protein, 543 aa, unidentified
  REGION 1..543: note = Category: MG81 effectors
  REGION 1..543: note = Description: MG81-502 effector
  source 1..543: note = uncultivated organism sequence
MATTDKKDEENLRAYKFRLDPNQAQTTALYQAVGAARYTYNMLTAYNSEVNRLRDDYWKKRHDEGISDADIKKELKALAKEDKRYKQLKYGAFSTQYLTPERDRHKDAALRIKNGEDPSVVWNQETERSANPWLHTVNRRVLVSGLQNASDAWDNFWDSRMGKRAGRLVGTPRFKKKGVSRDSFTVPAAEKAEKMGAYGTAYLRGEPAYKQGRRKITDYRHVRLSYLGTIRTFNSTKPLVKAVAAGAEIRSYTVSRNADRWYVSFLVKFSEPIRRSVTKRARAAGAVGVDLGVKYLASLSDSEAPQRFPNLKFAEGLPSLENPRWSEASSRRLHKLQRALVRSQKGSNRRSRLVKQIARLHHMTALRRESNLHQLTKKLATGYTLVGFEDLNVSGMTASAKGTVENPGKNVAQKSGLNRVVLDAAFGVFRNQLEYKAVWYGSAFEKVNRYFASSQMCSECGRKVKTKLTLRDRVFDCVYCGNMMDRDFNAAVNICREAQRLFDEKLASEDGESLNGRGSRGALRGAKTVEASRPPASHRRGSP

SEQ ID NO: 2224 - protein, 511 aa, unidentified
  REGION 1..511: note = Category: MG81 effectors
  REGION 1..511: note = Description: MG81-503 effector
  source 1..511: note = uncultivated organism sequence
MAKCSTDTCCLKLPLRLEKWQEDRLAKRFEIARQIYNTMVRAELKKLRAMEQSEPYKANQEKIQALDWKTQADKQALKALYKERDKLLRDGGFSEYGFKSDIKNYYKHFNNNIGSSVAVHGIAPQVWAAFEKMLFKKEGKKVHFKKKGDIRSLRGYSATGKSGGVEIIFRETYIEWKGLKLPLKLSPDNIYETQMLSYRVKYVRLLRKPGKRKDRWYAQLSLEGKPVIKYNPKTGEVRHPIGKGAVGLDIGPQTLAYSAATGADLVELANQVQNVEQEKRRLQRKLDRSRRATNPGNYADDGTIRRGIALTHNKSKRYLRTQQELKYLQHQQAEIRKRQHTELANHLLSLGDCFYVEKMVWTSLTHRAKETEISEKTGKIKRKKRFGKSVANKAPATLIGILQRKSAALGIPGVIEVPTSVKASQYNHQSGTYTPKPLSQRWNNMPDGERVQRDLYSAFLLQHYDPQTNTFDANSLHQDYPQFVQYHHDAVLRLYAMPKTPSSMGIKKSLR

SEQ ID NO: 2225 - protein, 511 aa, unidentified
  REGION 1..511: note = Category: MG81 effectors
  REGION 1..511: note = Description: MG81-504 effector
  source 1..511: note = uncultivated organism sequence
MREDSQNTCCLTLPLKIEKWQADRLIKRFEIARQIYNTLVHAELKKLQKMEASAEYRKIQDRIRELNPSDVRAKKEWKILKDKQEKLWKAWKITEYGFKSDIKAYYKYFNENIGSAVATHDIAPRVWAAFEKKLNDRTGKVKIQYKKAGDIRSLKGFSVSGKSGGTEIIFHKTYIAWKGLTLPLKLSPDNAYEKEMLMRRIKYVRILRKPGKHKDRWYAQLSLEGNPVVKLDPVSGLPRHPIGKGAVGIDIGPQTLAYSAEGGADLVELADQVQCIEQEKSRLQRKMDRSRRASNPDNYAQDGTIKRGVKLTHNKSRRYCKLQKELAYMLYRQAETRKRQHRELINRLLTMGDCFYIEDMHWNSLAHRAKKTEISEKTGRYKRKKRFGKSIANKAPAMLVDMLKQKCKSLELDVVMVNTSLKASQYNHQTGKYEKKTLSQRWNHMPDGEQIQRDLYSAFLLQHVVPEKNAFDNEALCREYPKFVQYHHEVIERLRSLPKTISSMGIRRSVS

SEQ ID NO: 2226 - protein, 530 aa, unidentified
  REGION 1..530: note = Category: MG81 effectors
  REGION 1..530: note = Description: MG81-505 effector
  source 1..530: note = uncultivated organism sequence
MILLAKNNNNNNTDTCVLTLPLRVEKWQEDCLLKRFEAARRIYNSLLNFELKKLRQLERTVEYRQIQSVISSAYRSNTKDSPECKDAFKRREKLISANGISENGFKSDVKFFYKHFDGLIGSNVAVHCIAVQLWAAFDKYLSGSGKEIHFKRLGDISSLKGYSVKGKSGGCEIIFRGQYVEWTRKKKKLLLPLKIDPDNEYEREMLSRRVKYVRIIKKPGKNRLRWYAQLTLEGKPALKYSAETGKPIHSVGKGNVGIDIGPQTVAYASDKEVALLELADRVTNIEHQKKKLQRKLDRSRRATNPDNYKPDGTIKCGVKLTRNKSKRYLKLQSKLAYIQHRQAEIRKLQHTCLANHMLTLGDRFFVEKMNWPGLAHRAKETSISEKTGRYKRKKRFGKSLANKAPAMFISILKRKCETLGLPGVVEVDTFRLRASQYNHLSDTYEKKSLSERWNYMPISDGSDSSKTKRIQRDLYSAFLLQHTIPQPCSFDKEALRIDYPNFVIMHDAEIHRLESLPKTITSMGVRRSHS

SEQ ID NO: 2227 - protein, 498 aa, unidentified
  REGION 1..498: note = Category: MG81 effectors
  REGION 1..498: note = Description: MG81-506 effector
  source 1..498: note = uncultivated organism sequence
MKRFEAARRIYNSLLNFELKKLRQLERTVEYRQIQSVISSAYRSNTKDSPECKAALKRREKLIDENGLTKNGFKNDVKFFYKHFDGLIGSSVAVHCIAVQLWAAFNKYLCGNGKEIHFKRLGDISSLKGYSVKGKSGGCEIIFRGQYVEWTRKKKKLLLPLKIDPDNEYEREMLSRRVKYVRIIKKPGKNRLRWYAQLTLEGKPALKYSAETGKPIHSVGKGDVGIDIGPQTVAYASDKEVALLELADRVTNIEHQKKKLQRKLDRSRRATNPDNYKPDGTIKRGVKLTRNKSKRYLKLQSKLAYIQHRQAEIRKLQHTCLANHMLTLGDRFFVEKMNWPGLAHRAKETSISEKTGRYKRKKRFGKSLANKAPAMFISILKQKCETLGLPGVVEVDTFRLKASQYNHLSDTCEKKSLSERWNYMPISDGSDSSKTKRIQRDLYSAFLLQHTIPQSCSFDKEALRIDYPNFVTMHDAEIHRLESLPKTITSMGVRRSHS

SEQ ID NO: 2228 - protein, 511 aa, unidentified
  REGION 1..511: note = Category: MG81 effectors
  REGION 1..511: note = Description: MG81-507 effector
  source 1..511: note = uncultivated organism sequence
MAKCSTDTCCLTLPLRLEKWQEDRLAKRFEIARQIYNTMVRAELKKLRAMEQSEPYKANQEKIQALDRKTQTDKQALKALYKERDKLLRDGGFSEYGFKSDIKNYYKHFNNNIGSNVAFHGIAPQVWAAFEKMLFKKEGKKVHFKKKGDIHSLRGYSAAGKSGGVEIIFRETYIEWKGLKLPLKLSPDNIYETQMLSYRVKYVRLLRKPGKRKDRWYAQLSLEGKPVIKYNPKTGEVRHPIGKGAVGLDIGPQTLAYSAATGADLVELANQVQNVEQEKRRLQRKLDRSRRATNPGNYADDGTIRRGIALTHNKSKRYLRTQQELKYLQHQQAEIRKRQHTELANHLLSLGDCFYVEKMVWTSLTHRAKETEISEKTGKIKRKKRFGKSVANKAPATLIGILQRKSAALGIPGVIEVPTSVKASQYNHQSGTYTPKPLSQRWNNMPDGERIQRDLYSAFLLQHYDPQTNTFDANSLHQDYPQFVQYHHDAVLRLYAMPKAPSSMGIKRSLR

SEQ ID NO: 2229 - protein, 550 aa, unidentified
  REGION 1..550: note = Category: MG81 effectors
  REGION 1..550: note = Description: MG81-508 effector
  source 1..550: note = uncultivated organism sequence
MGWKSKGRGGTLVDNEEKKEDGATCCLTLPLKLEKWQSDHLEKRFEIARQLYNTLVHAELKKKCQVERMPEYQEIMKMIDAASNQKEKWALEKKRKAFLEENGFSRNAFKADMEKYYKHFNDNIGANVALHGITAQVWIAFDKVFVDNYKQKGKVHFKKPGELCSVQGYSQKKSGGKEIMFREDRIIWNQQGNRDRKKVKREFLLKLSPDNPYEAEMLKRHVKFVRILRKDGKTKPHWYAQLVLEGKPAVKRDPASGAPKHPIGHGVVGIDIGTRTLAYSTDSEVNLLELADRVQNIEQEKRRLQRKMDRSRRAMNPGNYKPDGSIKQGVKLTWNNSKRYKRIQHQYAMIQHHQADIRKQQHNELANYLLTLGDCFFVENMSYCDLAHRANKTEISEKTGRYKRKKRFGKSIANKAPAMLITMLKQKCQSRGLEGVKEVDTHVCASQYNHQTDTCIKKALENRWNIMPDGERIQRDLYSAFLLQHCRRDLPEYNRKELQKEFGEELYRVFDREALQRDYPQFVAYHHMTIQRLSELPHTIPSMGIRRIIS

SEQ ID NO: 2230 - protein, 526 aa, unidentified
  REGION 1..526: note = Category: MG81 effectors
  REGION 1..526: note = Description: MG81-509 effector
  source 1..526: note = uncultivated organism sequence
MAKNNNNDTDTCVLALPLRVEKWQEDCLLKRFEAARRIYNSLLNFELKKLRQLERTVEYRQIQSVISSAYRSNTKDSPECKDAFKRREKLISANGISEYGFKSDVKFFYKHFDGLIGSSVAVHCIAVQLWVAFDKYLSGSGKEIHFKRLGDISSLKGYSVKGKSGGLEIIFRGQYVEWTRKKKKLLLPLKIDPDNEYEREMLSRRVKYVRIIKKPGKNRLRWYAQLTLEGKPALKYSAETGKPIHSVGKGNVGIDIGPQTVAYASDKEVALLELADRVTNIEHQKKKLQRKLDRSRRATNPDNYKPDGTIKRGVKLTRNKSKRYLKLQSKLAYIQHRQAEIRKLQHTCLANHMLTLGDRFFVEKMNWPGLAHRAKETSISEKTGRYKRKKRFGKSLANKAPAMFISILKRKCETLGLPGVVEVDTYSLKASQYNHLSDTYEKKSLSERWNYMPISDGSDSSKTKRIQRDLYSAFLLQHTIPQPCSFDKKALRIDYPNFVTMHDAEIHRLESLPKTITSMGVRRSHS

SEQ ID NO: 2231 - protein, 529 aa, unidentified
  REGION 1..529: note = Category: MG81 effectors
  REGION 1..529: note = Description: MG81-510 effector
  source 1..529: note = uncultivated organism sequence
MILLAKNNNNNTDTCVLTLPLRVEKWQEDCLLKRFEAARRIYNSLLNFELKKLRQLERTVEYRQIQSVISSAYRSNTKDSPECKDAFKRREKLISANGISEYGFKSDVKFFYKHFDGLIGSSVAVHCIAVQLWAAFDKYLRGSGKEIHFKRLGEISSLKGYSVKGKSGGLEIIFRGQYVEWTRKKKKLLLPLKIDPDNEYEREMLSRRVKYVRIIKKPGKNRLRWYAQLTLEGKPALKYSAETGKPIHSVGKGNVGIDIGPQTVAYASDKEVALLELADRVTNIEHQKKKLQRKLDRSRRATNPDNYKPDGTIKRGVKLTRNKSKRYLKLQSKLAYIQHRQAEIRKLQHTCLANHMLTLGDRFFVEKMNWPGLAHRAKETSISEKTGRYKRKKRFGKSLANKAPAMFISILKQKCETLGLPGVVEVDTFRLKASQYNHLSDTCEKKSLSERWNYMPISDGSDSSKTKRIQRDLYSAFLLQHTIPQSCSFDKEALRIDYPNFVTMHDAEIHRLESLPKTITSMGVRRSHS

SEQ ID NO: 2232 - protein, 512 aa, unidentified
  REGION 1..512: note = Category: MG81 effectors
  REGION 1..512: note = Description: MG81-511 effector
  source 1..512: note = uncultivated organism sequence
MKKSSTDTCCLTLPLKLEKWQEDRLAKRFEIARQLYNTLVHAELKRLAQVKQTAEYRENERKIRALDWNDPGDQTKLKGLYKERRKSLKTAGFTDYSFTTDMGKYYKHFRDNIGSSVAVHGIAPQVWAAFDKLLFKKGGKKVHYKKPGEVNSVQGYSRTGKSGGTEIMFRGPYIEWKGLKLPLKLSPDNAYETDMLQRRVKLVRLVRRPGKRRGRWYAQLVLEAKPAIKADPVTGKAVHPIGSGPVGLDIGPQTLAYSAAGAAGLVELADRVQNIEQEKRCLQRKMDRSRRAANPDNYAEDGTIRRGVKLTHNKSKRYRRSQQELKYLQHRQAEIRKLQHIQLANHLLSLGDHFYVEKMEWSSLTHRAKKTVISEKTGKPRSKKRFGKSIANKAPAMLIEILRQKCKSLGLPNVVEINPADIKASQYNHLTGEYVKKSLSRRWNEMQDGEHLQRDLYSAFLLQHYDSMSKALDLDSLARDYPAFVQYHHREIERLHALPKTPASMGIRRSIA

SEQ ID NO: 2233 - protein, 511 aa, unidentified
  REGION 1..511: note = Category: MG81 effectors
  REGION 1..511: note = Description: MG81-512 effector
  source 1..511: note = uncultivated organism sequence
MREDSQNTCCLTLPLKIEKWQADRLIKRFEIARQIYNTLVHAELKKLQKMEASAEYRQIQDRIRELNPSDAGAKKEWKILKDKQEKLWKAWKITEYGFKSDIKAYYKYFNENIGAAGATHDIAPRVWAAFEKKLNDRTGKVKIQYKKAGDIRSLKGFSVSGKSGGTEIIFHKTYIAWKGLTLPLKLSPDNAYEKEMLMRRIKYVRILRKPGKHKDRWYAQLSLEGNPVVKLDPVSGLPRHPIGKGAVGIDIGPQTLAYSAEGGADLVELADRVQCIEQEKSRLQRKMDRSRRASNPDNYAQDGTIKRGVKLTHNKSRRYCKLQKELAYMLYRQAETRKRQHRELINRLLTMGDCFYIEDMHWNSLAHRAKKTEISEKTGRYKRKKRFGKSIANKAPAMLVDMLEQKCKSLELDVVMVNTSLKASQYNHQTGKYEKKTLSQRWNRMPDGEQIQRDLYSAFLLQHVVPEKNAFDNEALCRDYPKFVQYHHEVIERLRSLPKTISSMGIRRSVS

SEQ ID NO: 2234 - protein, 511 aa, unidentified
  REGION 1..511: note = Category: MG81 effectors
  REGION 1..511: note = Description: MG81-513 effector
  source 1..511: note = uncultivated organism sequence
MREHSQNTCCLTLPLKIEKWQADRLIKRFEIARQIYNTLVHAELKKLQKMEASAEYRQIQDRIRELNPSDAGAKKEWKILKDKQEKLWKAWKITEYGFKSDIKAYYKYFNENIGAAGATHDIAPRVWAAFEKKLNDRTGKVKIQYKKAGDIRSLKGFSVSGKSGGTEIIFHKTYIAWKGLTLPLKLSPDNAYEKEMLMRRIKYVRILRKPGKHKDRWYAQLSLEGNPVVKLDPVSGLPRHPIGKGAVGIDIGPQTLAYSAEGGADLVELADRVQCIEQEKSRLQRKMDRSRRASNPDNYAQDGTIKRGVKLTHNKSRRYCKLQKELAYMLYRQAETRKRQHRELINRLLTMGDCFYIEDMHWNSLAHRAKKTEISEKTGRYKRKKRFGKSIANKAPAMLVDMLEQKCKSLELDVVMVNTSLKASQYNHQTGKYEKKTLSQRWNRMPDGEQIQRDLYSAFLLQHVVPEKNAFDNEALCRDYPKFVQYHHEVIERLRSLPKTISSMGIRRSVS

SEQ ID NO: 2235 - protein, 536 aa, unidentified
  REGION 1..536: note = Category: MG81 effectors
  REGION 1..536: note = Description: MG81-514 effector
  source 1..536: note = uncultivated organism sequence
MDNEEKKEDGATCCLTLPLKLEKWQSDHLEKRFEIARQLYNTLVHAELKRIHRIERMPEYREIERLIEATTDKKEKWALKNQKKQFLRKNGINRNTFTTDMKRLYKHFNDNIGSNVAQHGIVSQVLTAFEKVYIENQSGEVHFKKPGDLRSVQGYSQKKSGGVEIMFREGKIIWNQQGNNDRKGVAREFPLKLSPDNSYEAEMLKKHVKFVRILRNEGKTKPHWYAQLVLEGKPAIKRDPASGAPKHPVGHGAVGIDIGTRTLAYSADSKVDLIELADLVQNIEQEKLLLQRKLDRSRRATNPENYKPDGTIKKGVKLTRNKSKRYRKIQHQLAMLQHRQADIRKRQHNELANYLLTLGDCFFVEDMDYRALTRKAKKTEISEKTGRYKRKKRFWKSIANKAPSMLIALLDQKCKSLNLEGVKKVDTAVKASQYNHQTDECKAKELKERWNIMPDGERIQRDLYSAFLLQHCRRDLPEYNRKELQKEFGEELYRVFDREALQRDYPQFVAYHHMTIQRLSELPHTIPSMGIRRIIS

SEQ ID NO: 2236 - protein, 542 aa, unidentified
  REGION 1..542: note = Category: MG81 effectors
  REGION 1..542: note = Description: MG81-515 effector
  source 1..542: note = uncultivated organism sequence
MATTDKKDKDKEKLRAYKFRLDPNQAQTIALYQAAGAARYTYNMLTAYNLEVNRLRDDYWKKRHDEGISDADIKKELNALTKEDKRYKQLKYGAFGTQYLTPEKKRHEQAEHRIENGEDPSVVWNQETERSANPWLHTANQRVLVSGLQNASDAWDNFWASRTGKRAGRLVGAPRFKKKGISRDSFTVPAAETMGAYGTAYLRGEAAYQQGKRTITDYRHVRLSYLGVIRTYDSTKPLVKAVAAGAEIRSYTVSRNADRWYVSFLVKFSEPIRRSATKRARAAGAVGVDLGVKYLASLSDSEAPQRFPNLKFAEGLPSLENPRWSEASSRRLHKLQRALARSQKGSNRRSRLVKQIARLHHMTALRRESNLHQLTKKLSTGYTLVGLEDLNVSGMTASAKGTVENPGKNVAQKSGLNRVVLDAAFGVFRYQLEYKTAWYGSTLEKIDRYFASSQTCSECGRKAKTKLTLRDRVFDCAYCGNMMDRDFNAAVNICREAQRLFNKKLASENGESLNGRGSRGALQGAETVEASRPPTSHRRGSP

SEQ ID NO: 2237 - protein, 512 aa, unidentified
  REGION 1..512: note = Category: MG81 effectors
  REGION 1..512: note = Description: MG81-516 effector
  source 1..512: note = uncultivated organism sequence
MKKCTTDTCCLTLPLKLEKWQEDRLAKRFEIARQIYNTLVRAEFKKLNELERTPEYKKILEQIHSLDWKDSGSRQRLNDLYRERNQILKNAKFTEYGFKSDMKFYYKHFSDNIGSCVAVHGIAPQVWAAFEKYLFKPEGKKVHFKRFGDVHSLRGYSKAGESGGAEITFCGTHIRWKNLELPIKLSPDNAYETEMLSRRVKYVRILRKPGKSKDRWYVQLSLEGKPAIKYDRNAGEIKHPVAHGAVGLDIGPQTLAYSAETTADLVELADQVQNIEQEKRRLQRKMDRSRRSTNPGNYNTDGTIRRGVKLTRNKSKAYCKLQRQLAYLQHTQAETRKRQHTELANYLLSLGDCFYVEEMKWSSLAHRAKETAVSEKTGRFKQKKRFGKSIANKAPSTLIGILQQKCESLGLPGIIYVPLSAKASQYNHLTGEYTPKPLSQRWNTMPDAQRVQRDLYSAFLLQHFDSQAGTYNLQSLQRDYPQFLQYHDQSIRRLSEMPKTLSSMGIRKSIRA

SEQ ID NO: 2238 - protein, 535 aa, unidentified
  REGION 1..535: note = Category: MG81 effectors
  REGION 1..535: note = Description: MG81-517 effector
  source 1..535: note = uncultivated organism sequence
MILLANNNNNNNNNNNNTDTCVLTLPLRVEKWQEDCLLKRFEAARRIYNSLLNFELKKLRQLERTVEYRQIQSVISSAYRSNTKDSLECKDAFKRREKLISANGISENGFKSDVKFFYKHFDGLIGSNVAVHCIAVQLWAAFDKYLSGSGKEIHFKRLGDISSLKGYYVKGKSGGCEIIFRGQYVEWTRKKKKLLLPLKIDPDNEYEREMLSRRVKYVRIIKKPGKNRLRWYAQLTLEGKPALKYSAGTGKPIHSVGKGNVGIDIGPQTVAYASDKEVALLELADRVTNIEHQKKKLQRKLDRSRRATNPDNYKPDGTIKRGVKLTRNKSKRYLKLQSKLAYIQHRQAEIRKLQHTCLANHMLTLGDRFFVEKMNWPGLAHRAKETSISEKTGRYKRKKRFGKSLANKAPAMFISILKRKCETLGLPGVVEVDTYSLKASQYNHLSDTYEKKSLSERWNYMPISDGSDSSKTKRIQRDLYSAFLLQHTIPQPCSFDKEALRIDYPNFVTMHDAEIHRLESLPKTITSMGVRRSHS

SEQ ID NO: 2239 - protein, 524 aa, unidentified
  REGION 1..524: note = Category: MG81 effectors
  REGION 1..524: note = Description: MG81-518 effector
  source 1..524: note = uncultivated organism sequence
MAKNNNTDTCVLTLPLRVEKWQEDCLLKRFEAARRIYNSLLNFELKKLRQLERTVEYRQIQSVISSAYRSNTKDSPECKDAFKRREKLISANGISEYGFKSDVKFFYKHFDGLIGSNVAVHCIAVQLWAAFDKYLRGSGKEIHFKRLGDISSLKGYSVKGKSGGREIIFRGQYIEWTRKKKKLLLPLKIDPDNEYEREMLSRRVKYVRIIKKPGKNRLRWYAQLTLEGKPALKYSAGTGKPIHSVGKGNVGIDIGPQTVAYASDKEVALLELADRVTNIEHQKKKLQRKLDRSRRATNPDNYKPDGTIKRGVKLTRNKSKRYLKLQSKLAYIQHRQAEIRKLQHTCLANHMLTLGDRFFVEKMNWPGLAHRAKETSISEKTGRYKRKKRFGKSLANKAPAMFISILKRKCETLGLPGVVEVDTYSLKASQYNHLSDTYEKKSLSERWNYMPISDGSDSSKTKRIQRDLYSAFLLQHTIPQPCSFDKEALRIDYPNFVTMHDAEIHRLESLPKTVTSMGVRRSHS

SEQ ID NO: 2240 - protein, 510 aa, unidentified
  REGION 1..510: note = Category: MG81 effectors
  REGION 1..510: note = Description: MG81-519 effector
  source 1..510: note = uncultivated organism sequence
MAARASTDTCCLTLPLLLEKWQSDRLEKRFEIARQIYNTLLRFELKKLERLKQTEEYQAILEKLQALDDSAQSGAERKTLFRELDAMRKKAGFTEYGFKSDIKDFYKHFNDNIGSNVAVHGIAPQVWQAFDRLFYGNGKKIHFKKRGDIHSLRGYSVAGKSGGVEIIYRGAFVEWKGLKLRIKHDSSNEYETEMLQNRIKYCRIVKREGKNKTRWYVQLMLEGKPAVKRDKQTDAPKHPVGQGSVGIDIGPQTIAYVANHEAALLELADKVQNIEREKRILLRKLDRSRRATNPDNYREDGTICSGKKLVWHKSNRYLRCQKQLSYLMRQQAEIRKAQHNELANHLLSLGDRFFVEDMEWPALTHRSKKTEISEKTGRYKKKKRFGKSVGNKAPALLIELLNQKLHSRGKEGVIKVPTTVRASQYNHITDTYQKKELSQRWNEMPDGKRIQRDLYSAFLLQHMNEAQTGFDRSALQRDYQAFTQLHDQVIDELRQAPKTIASMGVVRTKR

SEQ ID NO: 2241 - protein, 356 aa, unidentified
  REGION 1..356: note = Category: MG81 effectors
  REGION 1..356: note = Description: MG81-520 effector
  source 1..356: note = uncultivated organism sequence
MEATKTLKLRIKDKHAAVLSLMAREVNQVWNYCNETSSRAIRERREWLSGFDLQKLTAGYSKCEGVRIGSATVQLVCEEYATRRKQFKKARLNWRVSNPKSAKYSLGWVPFKAGGVKYKAGQVSFLGHRFSLWDSYGLSRFDLRAGSFSQDARGRWYLNVCVKVDVPKSAGTGLVGVDLGLKTAATCSDGEELASGLYRKHEGALGIAQRARKKGRVRAIHAKIANTRKDAMHKFSTGLVARNAAIFVGNVSADAMVKTRMAKSTLDAGWSMLKTMLEYKSHQAGIVFEEVNEAYTTQTCSSCGVIPSSSPKGRTGLRMRRWTCCGCGAEHDRDVNAAMNIAARGHARLAGGIPVL

SEQ ID NO: 2242 - protein, 534 aa, unidentified
  REGION 1..534: note = Category: MG81 effectors
  REGION 1..534: note = Description: MG81-521 effector
  source 1..534: note = uncultivated organism sequence
MGWKSTGRGGTRVKRSSTDTCCLTLPLKLEKWQSDRLEKRFEIGRQIYNTIVHAELKKLRKLERTQQYQEIEQKLENAKQEETKELWKKKRQLLDQNGLSENHFKADMKYYYPHFKDNIASSVAVHGIASQAWTAFEKVLLSKDGKMVHFKKKGELSSLRGYSQAGKSGGIEIIFRGSYVEWKGLKLPLQLSPNNEYETEMLSKRVKYVRILRKDGKTKTHWYAQLALEGKPAVKRDSISGAPKHPVGHGVVGIDIGTRTLAYSTDSAVNLLELADRVQNIEQEKRRLQRKMDRSRRAMNPGNYKPDGSIKQGVKLTWNNSKRYKRIQHQYAMIQHHQADIRKQQHNELANYLLTLGDCFFVENMSYCDLAHRANKTEISEKTGRYKRKKRFGKSIANKAPAMLITMLKQKCQSRGLKGVKEVDTHVRASQYNHQTDTCIEKALENRWNVMPDGERIQRDLYSAFLLQHCKQGLSEYNRKELKKEFGEELYRVFDREALQRDYPQFVAYHHMTIQRLSELPHTIPSMGIRRIIS

SEQ ID NO: 2243 - protein, 538 aa, unidentified
  REGION 1..538: note = Category: MG81 effectors
  REGION 1..538: note = Description: MG81-522 effector
  source 1..538: note = uncultivated organism sequence
MNNEEKEKEGATCCLTLPLKLEKWQSDHLEKRFEIARQLYNTLVHAELKKKCQVERMPEYQEIMKMIDTASNQKEKWALEKKRKAFLEENGFSRNAFKADMEKYYKHFNDNIGANVALHGITAQVWIAFDKVFVDNYKQKGKVHFKKPGELCSVQGYSQKKSGGKEIMFREDRIIWNQQGNRDRKKVKREFLLKLSPDNPYEAEMLKRHVKFVRILRKDGKTKPHWYAQLVLEGKPAVKRDPASGAPKHPIGHGVVGIDIGTRTLAYSTDSEVNLLELADRVQNIEQEKRRLQRKMDRSRRAMNPGNYKPDGSIKQGVKLTWNNSKRYKRIQHQYAMIQHHQADIRKQQHNELANYLLTLGDCFFVENMSYCDLAHRANKTEISEKTGRYKRKKRFGKSIANKAPAMLITMLKQKCQSRGLEGVKEVDTHVCASQYNHQTDTCIKKALENRWNIMPDGERIQRDLYSAFLLQHCRRDLPEYNRKELQKEFGEELYRVFDREVLQRDYPQFVAYHHMTIQRLSELPHTIASMGIRRSIS

SEQ ID NO: 2244 - protein, 505 aa, unidentified
  REGION 1..505: note = Category: MG81 effectors
  REGION 1..505: note = Description: MG81-523 effector
  source 1..505: note = uncultivated organism sequence
MAKATTDTCCLTLPLKLEKWQEDRLDKRLEIARKIYNTLVNFELKKLRKLEANSDYIALQEKLKETTNNTERKKLYKEIDKLRKEAGFTEYAFKSDVKAFYKVFNANIGSAVAVHGIAPQVWAAFDRLFYGNGKAVHFKRYGEINSLRGYSVAGKSGGVEIIYHETHIEWKGLKLPIKLDPDNDYEREMLQYRVKYCRIIRKPGRNKNHWYVQLSLEGKPAVKYDRNTGEVRHPVGSGAVGIDIGPQTIAYASDTEVALKELADKVNNIEQKKRVLQRKLDRSRRATNPDNYAPDGTIRRGVKLTRNKSRKYLKCQKELAYIQRQQADIRKRQHNELANHLLILGDRFYVEDMEWPALTHRAKKTEISEKTGKIKRKKRFGKSVGNKAPASLIGLLDLKLKSRGLAGVIRVDTRVRASQYNHLSDDYRKKELRDRWNDMPDGRHIQRDLYSAFLLQHMNEKQDGFDKAALHRDYEQFTERHNQCIEELRTAPKTLASMGIVRRAG

SEQ ID NO: 2245 - protein, 521 aa, unidentified
  REGION 1..521: note = Category: MG81 effectors
  REGION 1..521: note = Description: MG81-524 effector
  source 1..521: note = uncultivated organism sequence
MLILGRRMYMPAKQKEGGNRCVLTLPLLTEPWQEHIIEKRFKIIEHLKNQLISIELRKLKNLQRTKAYKNLIKQIESVPKSERTALYKERNKMLKDAGFSQYTFMDDMAGKKSLMQKHFESHINVQIAHKAAIDVWSSFEKFLFGTGQIVHYQKRGTLSSVASKSPKTGMFYYSDENIFKWSGGGTKPKGGIILCLRVAPVKTNYEKEMVANNETKYYRVVRKWMKTKYKYYLQITFAGKPADKHREISTGRVGIDIGTQTIAIASDKSVKLLELADKVNKNHIKKCELQRKLDRSRRYTNPDNFNPDGTVKRGTKGHKLKWNKSKHYIEIAGKIRELERKNADIRKYQHTCLANDILAMGNQIYIEPMNYKGLQKRAKETQVDEKGRYKKKKRFGKSLANKAPAMFVTILKTKVEQHGGEVYEVDIMSYRASQCDHTTGEYTKHGLNDRWRILGNGDKVQRDLYSAFLIKNSNKTHDEIDLDKCSKTYDNFKKLHDKEIENIRNEVKLRERKNISSYGIA

SEQ ID NO: 2246 - protein, 511 aa, unidentified
  REGION 1..511: note = Category: MG81 effectors
  REGION 1..511: note = Description: MG81-525 effector
  source 1..511: note = uncultivated organism sequence
MGKSSTDTCCLTLPLKLEKWQEDRLAKRFEIARQIYNTMVRAELKKLERVKQLPEYRKNQKEIQELDWKNSADKPRLKELRANQKRILQKQGFTEYGFKADSKDYYKHFIENIGSSVATHGIAPQVWNAFDKMLFQKDGKVVHFKRHGDVHSLKGGSVTHKSGGAEIMFRKTYIEWKGLKLPLKLSPNNAYEAEMLSYRVKYVRILRTRGKTKDRWYAQLSLEGKPAVKFDSSTGKLVHPVGRGAVGLDIGPQTLAYAAADEANLVELADQVQNIEQEKRRLQRKLDRSRRATNPDNYNENGTIRRGVKLTHNKSKRYCKLQKELSWIQHCQAETRKRQHIALANHLLSLGDCFYVEPMAWPSLTHRAKKTEVSEKTGKIKRKKRFGKSVANKAPASLIGILKLKCISLGLTGVVEVPMLLRASQYNHQSKDYEKKSLSQRWNDMPDGNRIQRDLYSAFLLQHYNSQSESFDQETLERDYPQFVRLHNQTIQRLSALPKTPSSMGIRRSVS

SEQ ID NO: 2247 - protein, 528 aa, unidentified
  REGION 1..528: note = Category: MG81 effectors
  REGION 1..528: note = Description: MG81-526 effector
  source 1..528: note = uncultivated organism sequence
MILLTKNNNNTDTCVLTLPLRVEKWQEDCLLKRFEAARRIYNSLLNFELKKLRQLERTVEYRQIQSVISSAYRSNTKDSPECKDAFKRREKLISANGISEYGFKSDVKFFYKHFDGLIGSNVAVHCIAVQLWAAFDKYLRGSGKEIHFKRLGDISSLKGYSVKGKSGGCEIIFRGQYIEWTRKKKKLLLPLKIDPDNEYEREMLSRRVKYVRIIKKPGKNRLRWYAQLTLEGKPALKYSAETGKPIHSVGKGNVGIDIGPQTVAYASDKEVALLELADRVTNIEHQKKKLQRKLDRSRRATNPDNYKPDGTIKRGVKLTRNKSKRYLKLQSKLAYIQHRQAEIRKLQHTCLANHMLTLGDRFFVGKMNWPGLAHRAKETSISEKTGRYKRKKRFGKSLANKAPAMFISILKRKCETLGLPGVVEVDTYNLKASQYNHLSDTCEKKSLSERWNYMPISDGSDSSKTKRIQRDLYSAFLLQHTIPQPCSFDKEALRIDYPNFVIMHDAEIHRLESLPKTITSMGVRRSHS

SEQ ID NO: 2248 - protein, 511 aa, unidentified
  REGION 1..511: note = Category: MG81 effectors
  REGION 1..511: note = Description: MG81-527 effector
  source 1..511: note = uncultivated organism sequence
MAKCSTDTCCLTLPLRLEKWQEDRLAKRFEIARQIYNTMVRAELKKLRAMEQSEPYKANQEKIQALDWKTQTDKQALKALYKERDKLLRDGGFSEYGFKSDIKNYYKHFNNNIGSNVAFHGIAPQVWAAFEKMLFKKEGKKVHFKKKGDIHSLRGYSAAGKSGGVEIIFRETYIEWKGLKLPLKLSPDNIYETQMLSYRVKYVRLLRKPGKRKDRWYAQLSLEGKPVIKYNPKTGEVRHPIGKGAVGLDIGPQTLAYSAATGADLVELANQVQNVEQEKRRLQRKLDRSRRATNPGNYADDGTIRRGIALTHNKSKRYLRTQQELKYLQHQQAEIRKRQHTELANHLLSLGDCFYVEKMVWTSLTHRAKETEISEKTGKIKRKKRFGKSVANKAPATLIGILQRKSAALGIPGVIEVPPSVKASQYNHQSGTYTPKPLSQRWNNMPDGERIQRDLYSAFLLQHYDPQTNTFDANSLHQDYPQFVQYHHDAVLRLYAMPKTPSSMGIKRSLR

SEQ ID NO: 2249 - protein, 333 aa, unidentified
  REGION 1..333: note = Category: MG81 effectors
  REGION 1..333: note = Description: MG81-528 effector
  source 1..333: note = uncultivated organism sequence
MAKCSTDTCCLTLPLRLEKWQEDRLAKRFEIARQIYNTMVRAELKKLRAMEQSEPYKANQEKIQALDWKTQADKQALKALYKERDKLLQDGGFSERGFKSDIKNYYKHFNNNIGSNVAFHGIAPQVWAAFEKMLFKKEGKKVHFKKKGDIRSLRGYSATGRSGGVEIIFRETYIEWKGLKLPLKLSPDNIYETQMLSYRVKYVRLLRKPGKRKDRWYAQLSLEGKPVIKYNPKTGEVRHPIGKGAVGLDIGPQTLAYSAATGADLVELANQVQNVEQEKRRLQRKLDRSRRATNPGNYADDGTIRRGIALTHNKSKRYLKNTAGIKISPASAS

SEQ ID NO: 2250 - protein, 512 aa, unidentified
  REGION 1..512: note = Category: MG81 effectors
  REGION 1..512: note = Description: MG81-529 effector
  source 1..512: note = uncultivated organism sequence
MPTKQKEDSNRCVLTLPLLTEPWQEHIIEKRFKIIEHLKNQLISIELRKLKNLQRTKAYKNLIKQIESVPKSERTVLYKERNKMLKDAGFSQYTFMDDMAGKKSLMQKHFESHINVQIAHKAAIDVWSSFEKFLFGTGQIVHYQKRGTLSSVASKSPKTGMFYYSDENIFKWSGGGTKPKGGIILCLRVASVKTNYEKEMVANNEIKYYRVVRKWMKTKYKYYLQITFAGKPADKHREISTGRVGIDIGTQTIAIASDKSVKLLELADKVNKNHIKKCELQRKLDRSRRYTNPDNFNPDGTVKRGTKGHKLKWNKSKHYIEIAGKIRELERKNADIRKYQHTCLANDVLAMENQIYIEPMNYKGLQKRAKETQVDEKGRYKKKKRFGKSLANKAPAMFVTILKTKAEQHGGEVYEVDIMSYRASQCDHTTGEYTKHGLNDRWRILGNGDKVQRDLYSAFLIKNSNKTHDEIDLDKCSKTYDSFKKLHDKEIENIRNEVILRKRRNISSYGIA

SEQ ID NO: 2251 - protein, 508 aa, unidentified
  REGION 1..508: note = Category: MG81 effectors
  REGION 1..508: note = Description: MG81-530 effector
  source 1..508: note = uncultivated organism sequence
MADKECCVLTLPLQTEIWQEHIIEKRFAIMEHLKNQLIAKELRRLKNLERTKEYRNLIDEINNTPKEKRKALFSKRRKLLKDSGFSEYDFKDDIAGKNSLMQKHFIEHIATQIAHKLASDVWRSFDKFLFGNGRFIHFSKRGSLRSVASQKNGNGMTYKNGYFIWNGGQSKNKIILKIKVTPPKNEYEKEMLSKKIKYLRIVKKWVKTRYKYYLQFALEGKPVKKDRIVNKGNVGIDIGTQTVAISSADSVKILELADKIDKNHTKKKILQRKMDRSRRYTNPQNYNEDGTIKKPPKEQRFSWYKSKKYIQLAGKVRELERKNADIRKYQHTCLANWILSLGDTVYVEQMNFSGLQRRAKETKIDKNGKYAKKKRYGKSLANKAPSMFLTILGSKLNQYGGQLNKINTYEFKASQYDHTDDTFTKHNRSERWHILSNGDKNQRDLYSAFLIMNSDISLKHCNREKCNETYSNFKVLQDKEIERLYSDIRKGNCKNISSFGFQRNAKAM

SEQ ID NO: 2252 - protein, 1308 aa, unidentified
  REGION 1..1308: note = Category: MG81 effectors
  REGION 1..1308: note = Description: MG81-531 effector
  source 1..1308: note = uncultivated organism sequence
MKVSKVNHVRAAVNKKGILYNTPVSEKRNVIEIKGHVREVNEKAQKLYATMGTIDEEIEKVSPKDLNNFKRVFDGYIKECAKTMSRRANKYGFDASKFRNVFEQTTYYSSKKDRTTGEWKNESIASGRFFKWNSDPKTVINQLINTYLRKSLYRTEKAGTKEVYLPDALKKLALAVYDKENFPNGVNALSYEEKTALAQAIYKDYSGEKKIDSIAESIQSQDVKVQSFSKDGKTVLKLSSAEDLNKTNPGKNKGFIFEFLKDFCNADKSGQDELRKHMRKLILLYYCGPEAYRTAEDNGIFADGFGECLPDEAESFCQDAIEEMANLPIAEEKGEKKRVRAAIKKALEEQIAASYRIAVKEPGITESDRFWIDYIEKTAGKIIVDCRMSQWQSRCMKKSLCLMTYQEWETYISSRFIDMGKAAYHFAMPKDLTSLNAASFGTVNALFKDGITSFDYEYIKAEESIEREISGYISSALNTFTASSILPAQREELLAKKDILSLRAEDENLSENMMKNILRFFGGSSVWKEKQEFSKENRVAFFSALQDRLRYVRNSSFHYASGEDTSRVKENPAVLALISGETERVGSIFAKKYYSNNVPMFYTEKDIEKMMENLYAKENFRPAQIPSFQSVVNHSDMDGVLTALVGAGYNSKIKSVGADITKQYRSAMYFVLKEIYYNDFLKLEDIKERFRREALNYKSPQATEKKDPPAESFRARISDLCEDKTITFAEICQQLMTDMQLQQGEMAKKPESKQNVTDKKAYIHFRLILESCIRSAFLDYVKNDGKYAFLLAPMYRKEAFSILKEEEFLPSFKPAKYSALLQGFDAKAESWFVLAHFLRKSELNHLIGAMKGYIEYTENIDRRAKYLSGERFNVSKKREDYKSIIPILEFVMNFNGQISNTITDYFDSEEEYADYLNSFILFAEEKDDKKIALKNFCNLPAPGSPTGKIGIFYDEQNPILNRNVVLSKMYGIDELFIGVYRKNRIKLSDYQSYYRLSKELESVFKSGVCKSEDEVKKLKKFQHMKNRVEMTDIATFTGIVNDLYSQLISWTYLRERDFMYYLLGYYYVKLYQTESVQNDSPLRTITSSDVSKAFSIQNGAVLYQIVAMNTPGLPLIVFEKDGKPSLDTANAANGTGIKVVRFVLDYLGGEETYSDVLAFFGNYKKNNDDVVKMRNYIDHFSYFAGYERSLMDLYSDFFDRFFEYDQKLHKSVSFVFKNILLRYFVISDLNFVSVYRYSYKDKKEGTDKCCGLELKKERKGGDLSLKADNVTIKYKNQNDPQKVQVFARDDEFLSRLEGILTYKRGESR

SEQ ID NO: 2253 - protein, 526 aa, unidentified
  REGION 1..526: note = Category: MG81 effectors
  REGION 1..526: note = Description: MG81-532 effector
  source 1..526: note = uncultivated organism sequence
MAKNNNNNTDTCVLTLPLRVEKWQEDCLLKRFEAARRIYNSLLNFELKKLRQLECTVEYRQIQSVISSAYRSNTKDSPECKDAFKRREKLISANGISEYGFKSDVKFFYKHFDGLIGSSVAVHCIAVQLWAAFDKYLRGSGKEIHFKRLGEISSLKGYSVKGKSGGLEIIFRGQYVEWTRKKKKLLLPLKIDPDNEYEREMLSRRVKYVRIIKKPGKNRLRWYAQLTLEGKPALKYSAETGKPIHSVGKGNVGIDIGPQTVAYASDKEVALLELADRVTNIEHQKKKLQRKLDRSRRATNPDNYKPDGTIKRGVKLTRNKSKRYLKLQSKLAYIQHRQAEIRKLQHTCLANHMLTLGDRFFVEKMNWPGLAHRAKETSISEKTGRYKRKKRFGKSLANKAPAMFISILKQKCETLGLPGVVEVDTFRLKASQYNHLSDTCEKKSLSERWNYMPISDGSDSSKTKRIQRDLYSAFLLQHTIPQSCSFDKEALRIDYPNFVTMHDAEIHRLESLPKTITSMGVRRSHS

SEQ ID NO: 2254 - protein, 508 aa, unidentified
  REGION 1..508: note = Category: MG81 effectors
  REGION 1..508: note = Description: MG81-533 effector
  source 1..508: note = uncultivated organism sequence
MADKECCVLTLPLQTEIWQEHIIEKRFAIMEHLKNQLIAKELRRLKNLERTKEYRNLIDEINNTPKEKRKALFSKRRKLLKDSGFSEYDFKDDIAGKNSLMQKHFIEHIATQIAHKLASDVWRSFDKFLFGNGRFIHFSKRGSLRSVASQKNGNGMTYKNGYFIWNGGQSKNKIILKIKVTPPKNEYEKEMLSKKIKYLRIVKKWVKTRYKYYLQFALEGKPVKKDRIVNKGNVGIDIGTQTVAISSADSVKILELADKIDKNHTKKKILQRKMDRSRRYTNPQNYNEDGTIKKPPKGQRFSWYKSKKYIQLAGKVRELERKNADIRKYQHACLANWILSLGDTVYVEQMNFSGLQRRAKETKIDKNGKYAKKKRYGKSLANKAPSMFLTILGSKLNQYGGQLNKINTYEFKASQYDHTDDTFTKHNRSERWHILSNGDKNQRDLYSAFLIMNSDISLKHCNRKKCNETYSNFKVLQDKEIERLYSDIRKGNCKNISSFGFQRNAKAM

SEQ ID NO: 2255 - protein, 540 aa, unidentified
  REGION 1..540: note = Category: MG81 effectors
  REGION 1..540: note = Description: MG81-534 effector
  source 1..540: note = uncultivated organism sequence
MATTDKKDEENLRAYKFRLDPNQAQTTALYQAVGAARYTYNMLTAYNLEVNRLRDDYWKRRHDEDISDADIKKELNALAKEDKRYKQLNYGAFGTQYLTPEKKRHEQAEHRIENGEDPSVVWNQETERSANPWLHTANQRVLVSGLQNASDAWDNFWASRTGKRAGRLVGTPRFKKKGVSRDSFTVPAPEKMGAYGTAYLRGEPAYKQGRRKITDYRHVRLSYLGTIRTFNSTKPLVKAVVAGAKIRSYTVSRNADRWYVSFLVKFSEPIRRSATKRARAAGSVGVDLGVKYLASLSDSEAPQRFPNLKFVEGLPSLENPRWSEASSRRLHKLQRALARSQKGSNRRSRLVKQIARLHHMTALRRESNLHQLTKKLATEYTLVGFEDLNVSGMTASAKGTVENPGKNVAQKSGLNRVVLDAAFGVFRNQLEYKAVWYGSAFEKVDRYFASSQTCSECGRKAKTKLTLRDRVFDCAYCGNMMDRDLNAAVNICREAQRLFDEKLASEDRESLNGRGSRGALRGAETVEASRPPASHRRGSP

SEQ ID NO: 2256 - protein, 522 aa, unidentified
  REGION 1..522: note = Category: MG81 effectors
  REGION 1..522: note = Description: MG81-535 effector
  source 1..522: note = uncultivated organism sequence
MANNNNNTDTCVLTLPLRVEKWQEDCLLKRFEAARRIYNSLLNFELKKLRQLERTVEYRQIQSVISSAYRSNTKDSPECKAALKRREKLIDANDLTEYGFKSDVKFFYKHFDGLIGSSVAVHCIAVQLWAAFNKYLCGNGKEIHFKRLGDISSLKGYSVKGKSGGCEIIFRGQYVEWTRKKKKLLLPLKIDPDNEYEREMLSRRVKYVRIIKKPGKNRLRWYAQLTLEGKPALKYSAETGKPIHSVGKGDVGIDIGPQTVAYASDKEVALLELADRVTNIEHQKKKLQRKLDRSRRATNPDNYKPDGTIKRGVKLTRNKSKRYLKLQSKLAYIQHRQAEIRKLQHTCLANHMLTLGDRFFVEKMNWPGLAHRAKETSISEKTGRYKRKKRFGKSLANKAPAMFISILKQKCETLGLPGVVEVDTFRLKASQYNHLSDTCEKKNLSERWNYMPISDGSDSSKTKRIQRDLYSAFLLQHTIPQSCSFDKEALRIDYPNFVTMHDAEIHRLESQNDHKHGCSAKS

SEQ ID NO: 2257 - protein, 521 aa, unidentified
  REGION 1..521: note = Category: MG81 effectors
  REGION 1..521: note = Description: MG81-536 effector
  source 1..521: note = uncultivated organism sequence
MMVTWKEGIPVGKSSTDTCCLTLPLKLEKWQEDRLAKRFEIARQIYNTMVRAELKKLERVKQLPEYRKNQKEIQTLDGKNSADRARLKELYGNQRKILQKQGFTEYGFKADSKDYYKHFIENIGSSVATHGIAPQVWNAFDKMLFQKDGKVVHFKRYGDVHSLKGGSVAHKSGGAEIMFRKTYIEWKGLKLPLKLSPNNAYEAEMLSYRVKYVRILRTRGKTKDRWYAQLSLEGKPAVKYDSSTGKPVHPVGRGAVGLDIGPQTLAYAAANEANLVELADQVQNIEQEKRRLQRKLDRSRRATNPDNYNENGTIRRGVKLTHNKSKRYCKLQKELSWIQHCQAETRKRQHIALANHLLSLGDCFYVEPMAWPSLTHRAKKTEVSEKTGRIKRKKRFGKSVANKAPASLIGILRLKCISLGLTGVVEVPMLLKASQYNHQSKDCAKKSLSQRWNDMPDGNRIQRDLYSAFLLQHYDSQSESFDQETLERDYPQFVRLHNQTIQRLSALPKTPSSMGIRRSVS

SEQ ID NO: 2258 - protein, 522 aa, unidentified
  REGION 1..522: note = Category: MG81 effectors
  REGION 1..522: note = Description: MG81-537 effector
  source 1..522: note = uncultivated organism sequence
MKKSSTDTCCLTLPLKLEKWQSDRLEKRFEIGRQIYNTVVRAELKKLQQVERTPQYREIEQKLKGAKQEEAKELWKKRTQLLSQSGFSEYGFKSDMKYYYQHFKENIGSSVAVHGIASQVWTAFEKVLFSKDGKMVHFKKKGELSSLRGFSQAGKSGGVEIIFRGSYVEWKGLKLPLKLSPDNDYETEMLSKRVKYVRILRQDGKTKPHWYAQLVLEGKPAIKRDPASGAPKHPIGHGVVGIDIGTRTLAYSADSKVDLIELADRVQNIEQEKMLLQRKLDRSRRATNPGNYNPDGTIKCGVKLTRNKSKRYRKIQHQLAMLQHRQADIRKRQHNELANYLLTLGDCFFVEDMDYRALTRKAKKTEISEKTGRYKRKKRFGKSIANKAPSMLIALLDQKCKSLNLEGVKKVDTAVKASQYNHQTDECKAKELKERWNIMPDGERIQRDLYSAFLLQHCRRDLPEYNRKKLQETFGNELYRVFDREALQRDYPKFVEYHRETIQRLSALPKTIASMGIRRIIS

SEQ ID NO: 2259 - protein, 495 aa, unidentified
  REGION 1..495: note = Category: MG81 effectors
  REGION 1..495: note = Description: MG81-538 effector
  source 1..495: note = uncultivated organism sequence
MAGKSDKARCVLTLPLLTEPWQEHIIEKRFRIMEHLKNSLIALELRKLKNIQRTKQYRQLKAEISNAPKENRKTLDKKRKELLINAGFSERAFKDDMTNMQKHFVEHISTHAAHKSASDVWRSFDKVLFHTGRKIHFIRRGSLSSIACQTDGNGMRFRNGMLHWNGGRCKNKVKLELRVACPKTPYECAMLEKKIKFERIIRKWVKTRYKYYVQFTLVGNAVPKPRKTGTGRVGIDIGPSSIAIASSQEVRLMELADKINQNHLRKVALQQKMDRSRRATNPDNFNENKTIRRGVKLSWHYSKHYQKLRGQVRELERKNADIRKYQHTCLANYILSLGTEVYIEQMNFKGLQARAKETTYNKNGRANRKKRFGKSIANRAPAMLVTILETKLKSYAGTELHKVNTWSYRASQYDHITDTYTKKLLRQRWAELGNGDRIQRDLYSAFLLMNSQPSLQSTDRERCSKTYSQFKSLHDQEIYRLQQTPERHLSSFGIA

SEQ ID NO: 2260 - protein, 538 aa, unidentified
  REGION 1..538: note = Category: MG81 effectors
  REGION 1..538: note = Description: MG81-539 effector
  source 1..538: note = uncultivated organism sequence
MDNEEKEKDGATCCLTLPLKLEKWQSDHLEKRFEIARQLYNTLVHAELKKKCQVERMPEYQEIMKMIDTASNQKEKWALEKKRKAFLEENGFSRNAFKADMEKYYKHFNDNIGANVALHGITAQVWIAFDKVFVDNYKQKGKVHFKKPGELCSVQGYSQKKSGGKEIMFREDRIIWNQQGNRDRKKVKREFLLKLSPDNPYEAEMLKRHVKFVRILRKDGKTKPHWYAQLVLEGKPAVKRDPASGAPKHPIGHGVVGIDIGTRTLAYSTDKEVNLLELADRVQNIEQEKRRLQRKMDRSRRATNPENYNPDGTFKRGVKLTRNKSKRYKRIQHQYAMIQHHQADIRKQQHNELANYLLTLGDCFFVENMSYCDLVHRANKTEISEKTGRYKRKKRFGKSIANKAPAMLITMLKQKCQSRGLEGVKEVDTHVRASQYNHQTDTCIEKALENRWNVMPDGERIQRDLYSAFLLQHCKQGLPEYNRKELKKEFGEELYRVFDREALQRDYPQFVAYHHMTIQRLSELPHTIPSMGIRRIIS

SEQ ID NO: 2261 - protein, 538 aa, unidentified
  REGION 1..538: note = Category: MG81 effectors
  REGION 1..538: note = Description: MG81-540 effector
  source 1..538: note = uncultivated organism sequence
MDNEEKEKDGATCCLTLPLKLEKWQSDHLEKRFEIARQLYNTLVHAELKKKCQVERMPEYQEIMKMIDAASNQKEKWALEKKRKAFLEENGFSRNAFKADMEKYYKHFNDNIGANVALHGITAQVWIAFDKVFVDNYKQKGKVHFKKPGELCSVQGYSQKKSGGKEIMFREDRIIWNQQGNRDRKKVKREFLLKLSPNNPYEAEMLKRHVKFVRILRKDGKTKPHWYAQLVLEGKPAVKRDPISSAPKHPVGHGVVGIDIGTRTLAYSTDKEVNLLELADHVQNIEQEKRRLQRKMDRSRCATNPENYNPDGTFKRGVKLTRNKSKRYRRIQHQLAMIQHHQADIRKQQHNELANYLLTLGDCFFVENMSYCDLVHRANKTEISEKTGRYKRKKRFGKSIANKAPAMLITMLKQKCQSRGLKGVKEVDTHVRASQYNHQTDTCIEKALENRWNVMPDGERIQRDLYSAFLLQHCKQGLPEYNRKELKKEFGEELYRVFDREALQRDYPQFVAYHHMTIQRLSELPHTIPSMGIRRIIS

SEQ ID NO: 2262 - protein, 482 aa, unidentified
  REGION 1..482: note = Category: MG81 effectors
  REGION 1..482: note = Description: MG81-541 effector
  source 1..482: note = uncultivated organism sequence
MDQRELRGLRTYALYCIVAAALLAVVFLFYFSRTKQNIQEQAEAQLTEVTRQYANAIKADMRGNIQTVEALAHVFGELGQGNPETIIPLITGAVGTLRLKRMGFVTLDGMAHTTDGLTFDARDRLYFKRALTASPTVAILLVDKTDNTPINVYVSPIVHKGKVLGALFATVQTDAFIMSIDDRLFNGSGQVLVTNNQGHILFRGRGPIQLARYNNIAELIPTGAPAATGNDINDISDTFGSGGLFRYDGSPYYMAHSKLEITSTDWHIFSIVPEDTLTANVGTIQREVLYLMLFFIGLSMVFLWLVLRMQGRQAKRLRRAKQFLETVIENIPGGFFRYSNDEKQEFDYISEGFLKLLGHTRASFREAYGNRFDNLVHPEDRKRVLDSINSQIKHSDYDTVEYRVTKADGRILWLFDKAQLVRDENGRHRHGHHVPAQYAAGTQNQRGALPYPHRAFRAHHLRTRPRNPLLLFLSPLQGKIRL

SEQ ID NO: 2263 - protein, 534 aa, unidentified
  REGION 1..534: note = Category: MG81 effectors
  REGION 1..534: note = Description: MG81-542 effector
  source 1..534: note = uncultivated organism sequence
MGWKSKGRGGTLVKKSSTDTCCLTLPLKLEKWQSDRLEKRFEIGRQIYNTIVHAELKKLRKLERTQQYQEIEQKLENAKQEETKELWKKKRQLLDQNGLSENHFKADMKYYYPHFKNNIASSVAVHGIASQAWTAFEKVLLSKDGKMVHFKKKGELSSLRGYSQAGKSGGIEIIFRGSYVEWKGLKLPLQLSPNNEYETEMLSKRVKYVRILRKDGKTKTHWYAQLALEGKPAVKRDSISGAPKHPVGHGVVGIDIGTRTLAYSADSKVDLIELADRVQNIEQEKMLLQRKLDRSRRATNPENYKPDGSIKQGVKLTWNNSKRYKRIQHQYAMIQHHQADIRKQQHNELANYLLTLGDCFFVEDMDYRALTRKAKKTEISEKTGRYKRKKRFGKSIANKAPSMLIALLDQKCKSLNLEGVKKVDTAVKASQYNHQTDECKAKELKERWNIMPDGERIQRDLYSAFLLQHCRRDLPEYNRKKLQETFGNELYRVFDREALQRDYPKFVEYHRETIQRLSALPKTIASMGIRRIIS

SEQ ID NO: 2264 - protein, 546 aa, unidentified
  REGION 1..546: note = Category: MG81 effectors
  REGION 1..546: note = Description: MG81-543 effector
  source 1..546: note = uncultivated organism sequence
MANVVYITFGFFRLIMTGLLQPNKNDGIFFQYYQCEVRWAPLAKATTDTCCLTLPLKLEKWHADRLEKRLEIARQIYNTLLRFELKKLHRLEESTEYIDIQNLLKETTDNVERNKLYKQLNKLRQDAGFSEYTFKADIKDFYKHFNNNIGSSVAVHGIAPQVWTAFDRLFYGSGKVVHFKKRGELTSLRGYSVAGKSGGVEIIFRGTYIEWKGLKLPIKLDPKNEYENEMLRQRIKYCRIIKKPGRSKNHWYVQLMLEGKPVIKVNKNTGELLHPVGKGAVGIDIGPQTIAYVSEKEVALKELADQINNIEQEKRVLQRKLDRSRRAMNPGNYEADGTIKRGVKLTRNKSKRYIKTQCELAYLLRRQADIRKRQHNELANHLLSLGDRFYVEDMEWPALAHRAKKTEISEKTGKFKRKKRFGKSIGNKAPSTLIGLLDLKLKSRGLEGVMRVDTKVRASQYNHLTDDYKKKELSERWNNMPDGRRIQRDLYSAFLLQHMNETQTDFDKDALIRDYEQFTVFHDQCIEELRRAPKTLASMGLVRRAS

SEQ ID NO: 2265 - protein, 341 aa, unidentified
  REGION 1..341: note = Category: MG81 effectors
  REGION 1..341: note = Description: MG81-544 effector
  source 1..341: note = uncultivated organism sequence
MLPLKIDPDNEYEREMLSRRVKYVRIIKKPGKNRLRWYAQLTLEGKPALKYSAETGKPIHSVGKGDVGIDIGPQTVAYASDKEVALLELADRVTNIEHQKKNSQRKLDRSRRATNPDNYKPDGTIKRGVKLTRNKSKRYLKLQSKLAYIQHRQAEIRKLQHTCLANHMLTLGDRFFVEKMNWPGLAHRAKETSISEKTGRYKRKKRFGKSLANKAPAMFISILKQKCETLGLPGVVEVDTFRLKASQYNHLSDTCEKKSLSERWNYMPISDGSDSSKTKRIQRDLYSAFLLQHTIPQSCSFDKEALRIDYPNFVTMHDAEIHRLESLPKTITSMGVRRSHS

SEQ ID NO: 2266 - protein, 511 aa, unidentified
  REGION 1..511: note = Category: MG81 effectors
  REGION 1..511: note = Description: MG81-545 effector
  source 1..511: note = uncultivated organism sequence
MAKCSTDTCCLTLPLRLEKWQEDRLAKRFEIARQIYNTMVRAELKKLRAMEQSEPYKANQEKIQALDWKTQADKQALKALYKERDKLLRDGGFSEYGFKSDIKNYYKHFNNNIGSSVAVHGIAPQVWAAFEKMLFKKEGKKVHFKKKGDIRSLRGYSATGKSGGVEIIFRETYIEWKGLKLPLKLSPDNIYETQMLSYRVKYVRLLRKPGKRKDRWYAQLSLEGKPVIKYNPKTGEVRHPIGKGAVGLDIGPQTLAYSAATGADLVELANQVQNVEQEKRRLQRKLDRSRRATNPGNYADDGTIRRGIALTHNKSKRYLRTQQELKYLQHQQAEIRKRQHTELANHLLSLGDCFYVEKMVWTSLTHRAKETEISEKTGKIKRKKRFGKSVANKAPATLIGILQRKSAALGIPGVIEVPTSVKASQYNHQSGTYTPKPLSQRWNNMPDGERIQRDLYSAFLLQHYDPQTNTFDANSLHQDYPQFVQYHRDAVLRLYAMPKTPSSMGIKRSLR

SEQ ID NO: 2267 - protein, 313 aa, unidentified
  REGION 1..313: note = Category: MG81 effectors
  REGION 1..313: note = Description: MG81-547 effector
  source 1..313: note = uncultivated organism sequence
MVANNEIKYYRVVRKWMKTKYKYYLQITFAGKPADKHREISTGRVGIDIGTQTIAIASDKSVKLLELADKVNKNHIKKCELQRKLDRSRRYTNPDNFNPDGTVRRGTKGHKLKWNKSKHYLEIAGKIRELERKNSDIRKYQHTCLANDILAMGNQIYIEPMNYKGLQKRAKETQVDEKGRYKKKKRFGKSLANKAPSMFVTILKTKAEQHGGEVYEVDIMSYRASQCDHTTGEYTKHGLNDRWRILGNGDKVQRDLYSAFLIKNSNKTHDEIDLDKCSKTYDSFKKLHDKEIENIRNEVKLRERKNISSYGIA

SEQ ID NO: 2268 - protein, 512 aa, unidentified
  REGION 1..512: note = Category: MG81 effectors
  REGION 1..512: note = Description: MG81-548 effector
  source 1..512: note = uncultivated organism sequence
MKKSNTDTCCLTLPLKLEKWQEDRLAKRFEIARQLYNTLVHAELKRLAQVKQTAEYRENERKIRALDWNDPGDQTKLKGLYKERRKSLKTAGFTDYSFTTDMGKYYKHFRDNIGSSVAVHGIAPQVWAAFDKLLFKKGGKKVHYKKPGEVNSVQGYSRTGKSGGTEIMFRGPYIEWKGLKLPLKLSPDNAYETDMLQRRVKLVRLVRRPGKRRDRWYAQLVLEGKPAIKADPVTGKAVHPIGSGPVGLDIGPQTLAYSAAGAAGLVELADRVQNIEQEKHCLQRKMDRSRRATNPDNYAEDGTIRRGVKLTHNKSKRYRRSQQELKYLQHRQAEIRKLQHIQLANHLLSLGDHFYVEKMEWSSLTHRAKKTVISEKTGKPRSKKRFGKSIANKAPAMLIEILRQKCKSLGLPNVVEINPADIKASQYNHLTGEYVKKSLSRRWNEMQDGEHLQRDLYSAFLLQHYDSMSKALDLDSLARDYPAFVQYHHREIERLHALLKTPASMGIRRSIA

SEQ ID NO: 2269 - protein, 429 aa, unidentified
  REGION 1..429: note = Category: MG81 effectors
  REGION 1..429: note = Description: MG81-549 effector
  source 1..429: note = uncultivated organism sequence
MLKDAGFSQYTFMDDMAGKKSLMQKHFESHINVQIAHKAAIDVWSSFEKFLFGTGQIVHYQKRGTLSSVASKSPKTGMFYYSDENIFKWSGGGTKPKGGIILCLRVASVKTNYEKEMVANNEIKYYRVVRKWMKTKYKYYLQITFAGKPADKHREISTGRVGIDIGTQTIAIASDKSVKLLELADKVNKNHIKKCELQRKLDRSRRYTNPDNFNPDGTVKRGTKGHKLKWNKSKHYLEVAGKIRELERKNADIRKYQHTCLANDILAMGNQIYIEPMNYKGLQKRAKETQVDEKGRYKKKKRFGKSLANKAPAMFVTILKTKAEQHGGEVYEVDIMSYRASQCDHTTGEYTKHGLNDRWRILGNGDKVQRDLYSAFLIKNSNKTHDEIDLDKCSKTYDSFKKLHDKEIENIRNEVILRKRRNISSYGIA

SEQ ID NO: 2270 - protein, 538 aa, unidentified
  REGION 1..538: note = Category: MG81 effectors
  REGION 1..538: note = Description: MG81-550 effector
  source 1..538: note = uncultivated organism sequence
MDNEEKEKDGATCCLTLPLKLEKWQSDHLEKRFEIARQLYNTLVHAELKKKCQVERMPEYQEIMKMIDAASNQKEKWALEKKRKAFLEENGFSRNAFKADMEKYYKHFNDNIGANVALHGITAQVWIAFDKVFVDNYKQKGKVHFKKPGELCSVQGYSQKKSGGKEIMFREDRIIWNQQGNRDRKKVKREFLLKLSPDNPYEAEMLKRHVKFVRILRKDGKTKPHWYAQLVLEGKPAVKRDPISSAPKHPVGHGVVGIDIGTRTLAYSADNKVDLIELADRVQNIEQEKRRLQRKMDRSRRAMNPENYNSDGTFKRGVKLTRNKSKRYRRIQHQLAMIQHHQADIRKQQHNELANYLLTLGDCFFVENMSYCDLVHRANKTEISEKTGRYKRKKRFGKSIANKAPAMLITMLKQKCQSRGLKGVKEVDTHVRASQYNHQTDTCIEKALENRWNVMPDGERIQRDLYSAFLLQHCKQGLPEYNRKELKKEFGEELYRVFDREALQRDYPQFVAYHHMTIQRLSELPHTIPSMGIRRIIS

SEQ ID NO: 2271 - protein, 522 aa, unidentified
  REGION 1..522: note = Category: MG81 effectors
  REGION 1..522: note = Description: MG81-551 effector
  source 1..522: note = uncultivated organism sequence
MKRSSTDTCCLTLPLKLEKWQSDRLEKRFEIGRQIYNTIVHAELKKLRKLERTQQYQEIEQKLENAKQEETKELWKKKRQLLDQNGLSENHFKADMKHYYPHFKDNIASSVAVHGIASQAWTAFEKVLLSKDGKMVHFKKKGELSSLRGYSQTGKSGGIEIIFRGSYVEWKGLKLPLKLSPDNDYETEMLSKRVKYVRILRQDGKTKPHWYAQLVLEGKPAVKRDPISGAPKHPIGRGVVGIDIGTRTLAYSADSKVDLIELADRVQNIEQEKLLLQRKLDRSRRATNPENYKPDGTIKKGVKLTRNKSKRYRRIQHQLAMIQHHQADIRKQQHNELANYLLTLGDCFFVEDMDYRALTRKAKKTEISEKTGRYKRKKRFGKSIANKAPAMLITMLKQKCQSRGLKGVKEVDTHVRASQYNHQTDTCIEKALENRWNVMPDGERIQRDLYSAFLLQHCKQGLPEYNRKELKKEFGEELYRVFDREALQRDYPQFVAYHHMTIQRLSELPHTIPSMGIRRIIS

SEQ ID NO: 2272 - protein, 505 aa, unidentified
  REGION 1..505: note = Category: MG81 effectors
  REGION 1..505: note = Description: MG81-552 effector
  source 1..505: note = uncultivated organism sequence
MAKATTDTCCLTLPLKLEKWQADRLEKRLEIARQIYNTLLHFELKKLRRLEESKEYIEIQNLLKETTDHAARKGLFKQLNELRRAAGFSEYTFKSDIKDYYKHFKDNIGSNVAVHGIAPQVWAAFDRLFYGNGKSVHFKQRGELTSLRGYSVAGKSGGVEIIFRETLIEWKGLKLPIKLDSKNAYENEMLQQRVKYCRIVKRPGKTASRWYVQLMLEGRPVLKVDRRTGELRHPVGQGAVGIDIGPQTIAYVADGEVALKELADQLGNIEREKRVLQRRLDRSRRATNPNNYAPDGTIKRGTKLTRNKSKRYLKSQRELSFLLHRQAELRKRQHNELANHLLSLGDRFYVEDMEWPALTHRAKETEISEKTGKYKRKKRFGKSVGNKAPAMLLGLLDIKLKSRGLEGVVKVPTSVRASQYNHLTDDYRKKELGERWNTMPDGRRIQRDLYSAFLLQHMNEARSDFDKTALSADYERFVTLHDQCIEELRRAPKTLASMGLVRRAR

SEQ ID NO: 2273 - protein, 511 aa, unidentified
  REGION 1..511: note = Category: MG81 effectors
  REGION 1..511: note = Description: MG81-553 effector
  source 1..511: note = uncultivated organism sequence
MKRSGTDTCCLTLPLRLEKWQEDRLAKRFEIARQIYNTMVRTELKKLRKMELSQTYRSIQEQIQALDWKNQNDKQQLRSLYNERDQLLKKNGFTEYGFKSDIKYYYKHFNDNIGSSVAVHGIAPQVWAAFEKMLFRKEGKKVHYKKRDDIHSLRGYSVTGKSGGAEIIFRETYIEWKGLKLPLKLSPHNAYETEMLSRRVKYVRLLRKPGKRKDRWYAQLSLEGKPAIKHDPASGELRHPVGRGAVGLDIGPQTLAYSACCAADLVELADRVQNIEQVKRLLLRKMDRSRRTTNPDNYTDDGTIRRGVKLTHNKSKRYQRTQRELRYLQHCQAEMRKRQHIELANHLLTLGDRFYVEDMAWPSLTRRAKETAISEKTGTIKRKKRFGKSIANKAPAALIGILEQKCYSLGLPGVVKVPTSLKASQYNHQSGEYTPKPLSQRWNNMPDGERIQRDLYSAFLLQHYDSQTGNFDPVLLQQDYPQFVQYHHCAIQRLSAMPRTLSSMGIQRSLR

SEQ ID NO: 2274 - protein, 505 aa, unidentified
  REGION 1..505: note = Category: MG81 effectors
  REGION 1..505: note = Description: MG81-554 effector
  source 1..505: note = uncultivated organism sequence
MARSTSDTCCLTLPLKIEKWQADRLEKRLEIARQIYNTLLRFELKKLKQMEAREDYLAIQEQLKETKNDAERKKLYKQIEKIRSETGFSEYSFKTDIKAFYKHFQENIGSSVAVHGIASQVWIAFDKLFHGSGKAVHFKKRGELTSVRGYSVAGKSGGIEIIFRNTFIEWKGLKLPIKLDPSNAYETEMLQKRVKYCRIIKKPGKNKNHWYVQLSLEGKPAVKYHQQTGEILHPVGHGNVGIDIGPQTIAYVADGEIELKELADQVNNIERKKRVLLRKMDRSRRATNPDNYNPDGTIKRGVKLTKNKSKRYIKCQRQLAHLMRQQAETRKRQHNELANHLLSLGDHFYIEDMEWPSLTHRSTKTEISEKTGKFKRKKRFGKSVGNKAPATLTTLLDLKLKSRGLEGVTKVNTMVRASQYNHITDDYQKKKLSDRWNNMPDGRKIQRDLYSAFLLQHMNETHDGFDKAALCRDYEQFTVLHDQCIKRLEQLKKTIASMGIVRKPS

SEQ ID NO: 2275 - protein, 536 aa, unidentified
  REGION 1..536: note = Category: MG81 effectors
  REGION 1..536: note = Description: MG81-555 effector
  source 1..536: note = uncultivated organism sequence
MDNEEKKEDGATCCLTLPLKLEKWQSDHLEKRFEIARQLYNTLVHAELKRIHRIERMPEYREIERQIEATTDKKEKWALKNQKKQFLRKNGINRNTFTTDMKRLYKHFNDNIGSNVAQHGIVSQVLTAFEKVYIENQSGEVHFKKPGDLRSVQGYSQKKSGGVEIMFREGKIIWNQQGNNDRKGVAREFPLKLSPDNSYEAEMLKKHVKFVRILRNEGKTKPHWYAQLVLEGKPAIKRDPASGAPKHPVGHGVVGIDIGTRTLAYSTDSKVDLIELADRVQNTEQEKMLLQRKLDRSRRATNPENYKPDGTIKKGVKLTRNKSKRYRKIQHQLAMLQHRQADIRKRQHNELANYLLTLGDCFFVEDMDYRALTRKAKKTEISEKTGRYKRKKRFGKSIANKAPSMLIALLDQKCKSLNLEGVKKVDTAVKASQYNHQTDECKAKELKERWNIMPDGERIQRDLYSAFLLQHCRRDLPEYNRKKLQEAFGNEVYRVFDREALQRDYPKFVEYHRETIQRLSALPKTIASMGIRRIIS

SEQ ID NO: 2276 - protein, 554 aa, unidentified
  REGION 1..554: note = Category: MG81 effectors
  REGION 1..554: note = Description: MG81-556 effector
  source 1..554: note = uncultivated organism sequence
MDNEEKEKDGATCCLTLPLKLEKWQSDHLEKRFEIARQLYNTLVHAELKRIHRIERMPEYREIERQIEATTDKKEKWALKNQKKQFLRKNGINRNTFTTDMKRFYKHFNDNIGSNVAQHGIVSQVLTAFEKVYIENQSGEVHFKKPGDLRSVQGYSQKESGGKEIMFRNGKIIWTQQENDDRKKSPKYQQRKKRQNYKGVKGIAREFPVVFSKNNPYEAEMLTKHVKFVRILRKDGKTKPHWYAQLVLEGKPAVKRDPISSAPKHPVGHGVVGIDIGTRTLAYSTDKEVNLLELADRVQNIEQEKRRLQRKMDRSRRAMNPENYNSDGTFKRGVKLTRNKSKRYRRIQHQLAMIQHHQADIRKQQHNELANYLLTLGDCFFVENMSYCDLVHRANKTEISEKTGRYKRKKRFGKSIANKAPAMLITMLKQKCQSRGLKGVKEVDTHVRASQYNHQTDTCIEKALENRWNIMPDGERIQRDLYSAFLLQHCKQGLPEYNRKELKKEFGEELYRVFDREALQRDYPQFVAYHHMTIQRLSELPHTIPSMGIRRIIS

SEQ ID NO: 2277 - protein, 512 aa, unidentified
  REGION 1..512: note = Category: MG81 effectors
  REGION 1..512: note = Description: MG81-557 effector
  source 1..512: note = uncultivated organism sequence
MPTKQKEDSNRCVLTLPLLTEPWQEHIIEKRFKIIEHLKNQLISIELRKLKNLQRTKAYKNLIKQIESVPKSERTVLYKERNKMLKDAGFSQYTFMDDMAGKKSLMQKHFESHINVQIAHKAAIDVWSSFEKFLFGTGQIVHYQKRGTLSSVASKSPKTGMFYYSDENIFKWSGGGTKPKGGIILCLRVASVKTNYEKEMVANNEIKYYRVVRKWMKTKYKYYLQITFAGKPADKHREISTGRVGIDIGTQTIAIASDKSVKLLELADKVNKNHIKKCELQRKLDRSRRYTNPDNFNPDGTVKRGTKAHKLKWNKSKHYIEIAGKIRELERKNADIRKYQHTCLANDILAMGNQIYIEPMNYKGLQKRAKETQVDEKGRYKKKKRFGKSLANKAPAMFVTIMKTKAEQHGGEVYEVDIMSYRASQCDHTTGEYTKHGLNDRWRILGNGDKVQRDLYSAFLIKNSNKTHDEIDLDKCSKTYDSFKKLHDKEIENIRNEVKLRERKNISSYGIA

SEQ ID NO: 2278 - protein, 526 aa, unidentified
  REGION 1..526: note = Category: MG81 effectors
  REGION 1..526: note = Description: MG81-558 effector
  source 1..526: note = uncultivated organism sequence
MAKKNNNDTDTCVLTLPLRVEKWQEDCLLKRFEAARRIYNSLLNFELKKLRQLERTVEYRQIQSVISSAYRSNTKDSPECKDAFKRREKLISANGISEYGFKSDVKFFYKHFDGLIGSSVAVHCIAVQLWAAFDKYLRGSGKEIHFKRLGDISSLKGYSVKGKSGGLEIIFRGQYVEWTRKKKKLLLPLKIDPDNEYEREMLSRRVKYVRIIKKPGKNRLRWYAQLTLEGKPALKYSAETGKPIHSVGKGDVGIDIGPQTVAYASDKEVALLELADRVTNIEHQKKKLQRKLDRSRRATNPDNYKPDGTIKRGVKLTRNKSKRYLKLQSKLAYIQHRQAEIRKLQHTCLANHMLTLGDRFFVEKMNWPGLAHRAKETSISEKTGRYKRKKRFGKSLANKAPAMFISILKRKCETLGLPGVVEVDTFRLKASQYNHLSDTYEKKSLSERWNYMPISDGSDSSKTKRIQRDLYSAFLLQHTIPQPCSFDKEALRIDYPSFVTMHDAEIHRLESLPKTITSMGVRRSHS

SEQ ID NO: 2279 - protein, 522 aa, unidentified
  REGION 1..522: note = Category: MG81 effectors
  REGION 1..522: note = Description: MG81-559 effector
  source 1..522: note = uncultivated organism sequence
MKRSSTDTCCLTLPLKLEKWQSDRLEKRFEIGRQIYNTIVHAELKKLRKLERTQQYQEIEQKLENAKQEETKELWKKKRQLLDQNGLSENHFKADMKYYYPHFKDNIASSVAVHGIASQAWTAFEKVLLSKDGKMVHFKKKGELSSLRGYSQAGKSGGIEIIFRGSYVEWKGLKLPLQLSPNNEYETEMLSKRVKYVRILRKDGKTKTHWYAQLALEGKPAVKRDSISGAPKHSVGHGVVGIDIGTRTLAYSTDSAVNLLELADRVQNIEQEKRRLQRKMDRSRRAMNPGNYKPDGSIKQGVKLTWNNSKRYKRIQHQYAMIQHHQADIRKQQHNELANYLLTLGDCFFVENMSYCDLAHRANKTEISEKTGRYKRKKRFGKSIANKTPAMLITMLKQKCQSRGLEGVKEVDTHVCASQYNHQTDTCIKKALENRWNIMPDGERIQRDLYSAFLLQHCRRDLPEYNGKELQKEFGEELYRVFDREALQRDYPQFVAYHHMTIQRLSELPHTIPSMGIRRIIS

SEQ ID NO: 2280 - protein, 526 aa, unidentified
  REGION 1..526: note = Category: MG81 effectors
  REGION 1..526: note = Description: MG81-560 effector
  source 1..526: note = uncultivated organism sequence
MNNEEKEKDGATCCLTLPLKLEKWQSDRLEKRFEIGRQIYNTIVHAELKKLRKLERTQQYQEIEQKLENAKQEETKELWKKKRQLLDQNGLSENHFKADMKHYYPHFKDNIASSVAVHGIASQAWTAFEKVLLSKDGKMVHFKKKGELSSLRGYSQAGKSGGIEIIFRGSYVEWKGLKLPLKLSPDNDYETEMLSKRVKYVRILRKDGKTKTHWYAQLALEGKPAVKRDSISGAPKHPVGHGVVGIDIGTRTLAYSTDKEVNLLELADRVQNIEQEKRRLQRKMDRSRRAMNPGNYKPDGSIKQGVKLTWNNSKRYKRIQHQYAMIQHHQADIRKQQHNELANYLLTLGDCFFVENMSYCDLVHRANKTEISEKTGRYKRKKRFGKSIANKAPAMLITMLKQKCQSRGLEGVKEVDTHVRASQYNHQTDTCIEKALENRWNVMPDGERIQRDLYSAFLLQHCKQGLPEYNRKELKKEFGEELYRVFDREALQRDYPQFVAYHHMTIQRLSELPHTIPSMGIRRIIS

SEQ ID NO: 2281 - protein, 341 aa, unidentified
  REGION 1..341: note = Category: MG81 effectors
  REGION 1..341: note = Description: MG81-561 effector
  source 1..341: note = uncultivated organism sequence
MLPLKIDPDNEYEREMLSRRVKYVRIIKKPGKNRLRWYAQLTLEGKPALKYSAETGKPIHSVGKGDVGIDIGPQTVAYASDKEVALLELADRVTNIEHQKKKLQRKLDRSRRATNPDNYKPDGTIKRGVKLTRNKSKRYLKLQSKLAYIQHRQAEIRKLQHTCLANHMLTLGDRFFVEKMNWPGLAHRAKETSISEKTGRYKRKKRFGKSLANKAPAMFISILKQKCETLGLPGVVEVDTFRLKASQYNHLSDTCEKKSLSERWNYMPISDGSDSSKTKRIQRDLYSAFLLQHTIPQPCSFDKEALRIDYPNFVTMHDAEIHRLESLPKTVTSMGVRRSHS

SEQ ID NO: 2282 - protein, 554 aa, unidentified
  REGION 1..554: note = Category: MG81 effectors
  REGION 1..554: note = Description: MG81-562 effector
  source 1..554: note = uncultivated organism sequence
MDNEEKKEDGATCCLTLPLKLEKWQSDHLEKRFEIARQLYNTLVHAELKRIHRIERMPEYREIERLIEATTDKKEKWALKNQKKQFLRKNGINRNTFTTDMKRLYKHFNDNIGSNVAQHGIVSQVLTAFEKVYIENQSGEVHFKKPGDLRSVQGYSQKESGGKEIMFRNGKIIWTQQENDDRKKSPKYQQRKKRQNYKGVKGIAREFPVVFSKNNPYEAEMLTKHVKFVRILRKDGKTKPHWYAQLVLEGKPAIKRDPASGAPKHPVGHGVVGIDIGTRTLAYSADSKVDLIELADRVQNIEQEKMLLQRKLDRSRRATNPENYKPDGSIKQGVKLTWNNSKRYKRIQHQYAMIQHHQADIRKQQHNELANYLLTLGDCFFVEDMDYRALTRKAKKTEISEKTGRYKRKKRFGKSIANKAPSMLIALLDQKCKSLNLEGVKKVDTAVKASQYNHQTDECKAKELKERWNIMPDGERIQRDLYSAFLLQHCRRDLPEYNRKKLQETFGNELYRVFDREALQRDYPKFVEYHRETIQRLSALPKTIASMGIRRSIS

SEQ ID NO: 2283 - protein, 484 aa, unidentified
  REGION 1..484: note = Category: MG81 effectors
  REGION 1..484: note = Description: MG81-563 effector
  source 1..484: note = uncultivated organism sequence
MAKNNNNNDTDTCVLTLPLRVEKWQEDCLLKRFEAARRIYNSLLNFELKKLRQLERTVEYRQIQSVISSAYRSNTKDSPECKDAFKRREKLISANGISENGFKSDVKFFYKHFDGLIGSSVAVHCIAVQLWAAFDKYLSGSGKEIHFKRLGDISSLKGYSVKGKSGGCEIIFRGQYVEWTRKKKKLLLPLKIDPDNEYEREMLSRRVKYVRIIKKPGKNRLRWYAQLTLEGKPALKYSAETGKPIHSVGKGNVGIDIGPQTVAYASDKEVALLELADRVTNIEHQKKKLQRKLDRSRRATNPDNYKPDGTIKRGVKLTRNKSKRYLKLQSKLAYIQHRQAEIRKLQHTCLANHMLTLGDCFFVEKMNWPGLAHRAKETSISEKTGRYKRKKRFGKSLANKAPAMFISILKRKCETLGLPGVVEVDTFRLRASQYNHLSDTYEKKSLSERWNYMPISDGSDSSKTKRIQRDLYSASTHDTAALFF

SEQ ID NO: 2284 - protein, 511 aa, unidentified
  REGION 1..511: note = Category: MG81 effectors
  REGION 1..511: note = Description: MG81-564 effector
  source 1..511: note = uncultivated organism sequence
MAKCSTDTCCLTLPLRLEKWHEDRLAKRFEIARQIYNTMVRAELKKLRAMEQSEPYKANQEKIQALDWKTQADKQALKALYKERDKLLQDGGFSERGFKSDIKNYYKHFNNNIGSNVAVHGIAPQVWAAFEKMLFKKEGKKVHFKKKGDIHSLRGYSVTRKSGGVEIIFRETYIEWKGLKLPLKLSPDNIYETQMLSYRVKYVRLLRKPGKRKDRWYAQLSLEGKPVIKYNPKTGEVRHPIGKGAVGLDIGPQTLAYSAATGADLVELANQVQNVEQEKRRLQRKLDRSRRATNPGNYADDGTIRRGIALTHNKSKRYLRTQQELKYLQHQQAEIRKRQHTELANHLLSLGDCFYVEKMVWTSLTHRAKETEISEKTGKIKRKKRFGKSVANKAPATLIGILQRKSAALGIPGVIEVPTSVKASQYNHQSGTYTPKPLSQRWNNMPDGERIQRDLYSAFLLQHYDPQTNTFDANSLHQDYPQFVQYHHDAVLRLYAMPKTPSSMGIKRSLR

SEQ ID NO: 2285 - protein, 497 aa, unidentified
  REGION 1..497: note = Category: MG81 effectors
  REGION 1..497: note = Description: MG81-565 effector
  source 1..497: note = uncultivated organism sequence
MAKNEQNCCVLTLPLLTEPWQEHIIETRFDIVEKLKNTLIGFELRKLKQLERTRAWKRLMKSIRECSDEKQKKSLFKERNTMLKDAGFTEFGFSGDVTKLAVHKHFVPHIGANIAQRSGQDVWRSFEKYLFSNGKAVHFHKRGSLDSIACKKPRGDGMTIDSDVFTWKGGRCDDCVILKIRIRRPKNAYEREMIQKEIRNMRVVRKWIKTRYKYYLQITYQGAPVSKHRPVGKNRVGIDIGTQTIAWSSPTEVRLAELAAGIRRNHAEKTALQRKMDRSRRTANPQNYNPDGTIKRGIKLRWVKTKHYLRMEGRVRELERKNADIRKNEHICLANHILSLGKEVYIEDMNFKGLQGRAKETKVDKNGRFARKKRFGKSLANRAPSMFVTILENKLKSAGGNLYKVNTRTFKASQYDHTADEYRKKTLGQRWNHLKNGDKIQRDLYSAFLLMNAAPTLEEPDKKLCKKTYPQFALLHDAEMERLNAEEKPHLSSMGIR

SEQ ID NO: 2286 - protein, 383 aa, unidentified
  REGION 1..383: note = Category: MG81 effectors
  REGION 1..383: note = Description: MG81-566 effector
  source 1..383: note = uncultivated organism sequence
MHFKKKGELSSLRGYSQTGKSGGIEIIFRGSYVEWKGLKLPLKLSPDNDYETEMLSKRVKYVRILRQDGKTKPHWYAQLVLEGKPAVKRDPISGAPKHPIGRGVVGIDIGTRTLAYSADSKVDLIELADRVQNIEQEKLLLQRKLDRSRRATNPENYKPDGTIKKGVKLTRNKSKRYRRIQHQLAMIQHHQADIRKQQHNELANYLLTLGDCFFVEDMDYRALTRKAKKTEISEKTGRYKRKKRFGKSIANKAPSMLIALLDQKCKSLNLEGVKKVDTAVKASQYNHQTDECKAKELKERWNIMPDGERIQRDLYSAFLLQHCRRDLPEYNRKKLQETFGNELYRVFDREALQRDYPKFVEYHRETIQRLSALPKTIASMGIS

SEQ ID NO: 2287 - protein, 1302 aa, unidentified
  REGION 1..1302: note = Category: MG81 effectors
  REGION 1..1302: note = Description: MG81-567 effector
  source 1..1302: note = uncultivated organism sequence
MKISKVDHIKTGVSELPIESGGMMYYYPGSNSKNVELRKHITQLCNRARNLYNVFVEPKAAKGKSLDKEICNTLNFYFKNYILKRVDDGNNDDGIYNNICTRNFNARPVMINFKEVNVTEINVQNVIDRCLRQSLRKKFAYNEKTFFIPDVIKKIGIVVFAHDKYLNEIKNISKDEAIALIKALREDYTKENMVETVAASIEKQNVPVQISKDGEQLVLSGSFNEKKAYIFEFMKKYASDEKGQDELLKHMRYLMLLYFYGKDTADDALNDDRFGAWNYGITLNEYKEILFSGEAADIRAELDNVPTNMKGKIRNLEDQLVNTIQKAVVAHYKNAIDGDELSDDDKKWVGFISDRVESKLLKICKSKGRDNGYKLTCKYLCEDLWDEWISFMAMKFVDMGKAVYHFAMEDRDAVTTGKTVSFGRVNSNYKNGLSSFDYERIKASDSFSRSLANYVLFAINNFDTSVRTPEERAKNKKEDILSDNSPVISDDAKKHILRFFGGASNYENTEVDTADTNTLFKECKCCLSAARNTSFHFVSGKNRFGDMPVINAIFKVEQSKAGKIYRKRMYSNNVPMFYAVKDIDDFMSSLYTSVRNDPAQIPSFNKVISRKEIYSFISEFILRDNREVLNNTEIAEIFKSSLYFVLKEIYYYDFINQKDIMDRFMKSINNLKAKDRKEQEAHNDFKKRIDQLKADGIGFGELCQEIMTEYNLQNNQKSKKPSAVKVKDKDGNVSVKEIKDDKTIYKHYVMLLYLGIRQAFYDYINEGKYAFLKKPNKRDLPDEEVFISGWTAKMYDSINLNNDVLMSWYITAHFLDQKQLNHLIGQFKTYVSYIDGIEKRAGATGNKQVKESEDNKKLYIDMITLLEFVKLYCGSVSNKIEDYFENADDYAKYIAGFVDFGGEDKNALQAFCNKKYKFEGDSVTLGKYFDAMNPILDRNVVLASMYGDRELLSAVADKVNEKEITKFYKLKEKAVEIMSENTSEPGELRKLREYQNLKNRIELVDVLSLTELTTALMSQLVGYTALRERDLMYMQLGYYYTKLFHTDSVEKDSYLRKLKGDCDIEDGAVLYQIAAMYSYDLPLYERDEDGISHAPKKPVSIGNKVKKFSEAYCRESKEAGNEYEIYKAGLNLFENISGKKDGRHDEYVDFRIYIDHLKYFAYHDMSILQMYSKLYGGFFSYSTKLRKSVSYVMPNILLSDFVNVKLGFDYKEEGMGDVTYRIPDIVIKEISSDYLSYKEFKSIVSSGNEVLKDGKRFVITGDFVNKNAKKPRKDNKPVSVPARSKSYLDAVSRLLAYRTDMK

SEQ ID NO: 2288 - protein, 530 aa, unidentified
  REGION 1..530: note = Category: MG81 effectors
  REGION 1..530: note = Description: MG81-568 effector
  source 1..530: note = uncultivated organism sequence
MILLANNNNNNNTDTCVLTLPLRVEKWQEDCLLKRFEAARRIYNSLLNFELKKLRQLERTVEYRQIQSVISSAYRSNTKDSLECKDAFKRRKKLTDENGISEYGFKSDVKFFYKHFDGLIGSSVAVHCIAVQLWAAFDKYLRGSGKEIHFKRLGDISSLKGYSVKGKSGGCEIIFRGQYVEWTRKKKKLLLPLKIDPDNEYEREMLSRRVKYVRIIKKPGKNRLRWYAQLTLEGKPALKYSAETGKPIHSVGKGDVGIDIGPQTVAYASDKEVALLELADRVTNIEHQKKKLQRKLDRSRRATNPDNYKPDGTIKRGVKLTRNKSKRYLKLQSKLAYIQHRQAEIRKLQHTCLANHMLTLGDRFFVEKMNWPGLAHRAKETSISEKTGRYKRKKRFGKSLANKAPAMFISILKRKCETLGLPGVVEVDTYNLKASQYNHLSDTYEKKSLSERWNYMPISDGSDSSKTKRIQRDLYSAFLLQHTIPQPCSFDKEALRIDYPNFVTMHDAEIHRLESLPKTVTSMGVRRSHS

SEQ ID NO: 2289 - protein, 538 aa, unidentified
  REGION 1..538: note = Category: MG81 effectors
  REGION 1..538: note = Description: MG81-569 effector
  source 1..538: note = uncultivated organism sequence
MNNEEKEKDGATCCLTLPLKLEKWQSDHLDKRFEIARQLYNTLVHAELKKKCQVERMPEYQEIMKMIDAASNQKEKWALEKKRKAFLEENGFSRNAFKADMEKYYKHFNDNIGANVALHGITAQVWIAFDKVFVDNYKQKGKVHFKKPGELCSVQGYSQKKSGGKEIMFREDRIIWNQQGNRDRKKVKREFLLKLSPDNPYEAEMLKRHVKFVRILRKDGKTKPHWYAQLVLEGKPAVKRDPASGAPKHPIGHGVVGIDIGTRTLAYSTDKEVNLLELADHVQNIEQEKRRLQRKMDRSRRATNPENYNPDGTFKRGVKLTRNKSKRYRRIQHQLAMIQHHQADIRKQQHNELANYLLTLGDCFFVENMSYCDLVHRANKTEISEKTGRYKRKKRFGKSIANKAPAMLITMLKQKCQSRGLEGVKEVDTHVRASQYNHQTDTCIEKALENRWNVMPDGERIQRDLYSAFLLQHCKQGLPEYNRKELKKEFGEELYRVFDREALQRDYPQFVAYHHMTIQRLSELPHTIPSMGIRRIIS

SEQ ID NO: 2290 - protein, 511 aa, unidentified
  REGION 1..511: note = Category: MG81 effectors
  REGION 1..511: note = Description: MG81-570 effector
  source 1..511: note = uncultivated organism sequence
MAKCSTDTCCLTLPLRLEKWQEDRLAKRFEIARQIYNTMVRAELKKLRAMEQSEPYKANQEKIQALDWKTQADKQALKALYKERDKLLRDGGFSEYGFKSDIKNYYKHFNNNIGSNVAFHGIAPQVWAAFEKMLFKKEGKKVHFKKKGDIHSLRGYSAAGKSGGVEIIFRETYIEWKGLKLPLKLSPNNIYETQMLSYRVKYVRLLRKPGKRKDRWYAQLSLEGKPVIKYNPKTGEVRHPIGKGAVGLDIGPQTLAYSAATGADLVELANQVQNVEQEKRRLQRKLDRSRRATNPGNYADDGTIRRGIALTHNKSKRYLRTQQELKYLQHQQAEIRKRQHTELANHLLSLGDCFYVEKMVWTSLTHRAKETEISEKTGKIKRKKRFGKSVANKAPATLIGILQRKSAALGIPGVIEVPTSVKASQYNHQSGTYTPKPLSQRWNNMPDGERIQRDLYSAFLLQHYDPQTNTFDANSLHQDYPQFVKYHHDAVLRLYAMPKTPSSMGIKRSLR

SEQ ID NO: 2291 - protein, 522 aa, unidentified
  REGION 1..522: note = Category: MG81 effectors
  REGION 1..522: note = Description: MG81-571 effector
  source 1..522: note = uncultivated organism sequence
MKRSSTDTCCLTLPLKLEKWQSDRLEKRFEIGRQIYNTVVRAELKKLQQVERTPQYREIEQKLKGAKQEEAKELWKKRTQLLSKSGFSEYGFKSDMKYYYQHFKENIGSSVAVHGIASQVWTAFEKVLFSKDGKMVHFKKKGELSSLRGYSQAGKSGGVEIIFRGSYVEWKGLKLPLKLSPDNDYETEMLSKRVKYVRILRQDGKTKPHWYAQLVLEGKPAIKRDPASGAPKHPVGHGAVGIDIGTRTLAYSADSKVDLIELADRVQNIEQEKLLLQRKLDRSRRATNPENYKPDGTIKKGVKLTRNKSKRYRKIQHQLAMLQHRQANIRKRQHNELANYLLTLGDCFFVEDMDYRALTRKAKKTEISEKTGRYKRKKRFGKSIANKAPSMLIALLDQKCKSLNLEGVKKVDTAVKASQYNHQTDECKAKELKERWNIMPDGERIQRDLYSAFLLQHCRRDLPEYNRKKLQETFGNEVYRVFDREALQRDYPKFVEYHRETIQRLSALPKTIASMGIRRIIS

SEQ ID NO: 2292 - protein, 538 aa, unidentified
  REGION 1..538: note = Category: MG81 effectors
  REGION 1..538: note = Description: MG81-572 effector
  source 1..538: note = uncultivated organism sequence
MDNEEKKEDGATCCLTLPLKLEKWQSDHLEKRFEIARQLYNTLVHAELKKKCQVERMPEYQEIMKMIDAASNQKEKWALEKKRKAFLEENGFSRNAFKADMEKYYKHFNDNIGANVALHGITAQVWIAFDKVFVDNYKQKGKVHFKKPGELCSVQGYSQKKSGGKEIMFREDRIIWNQQGNRDRKKVKREFLLKLSPDNPYEAEMLKRHVKFVRILRKDGKTKPHWYAQLVLEGKPAVKRDPASGAPKHPVGHGVVGIDIGTRTLAYSTDKEVNLLELADRVQNIEQEKRRLQRKMDRSRRATNPENYNPDGTFKRGVKLTRNKSKRYRRIQHQLAMIQHHQADIRKQQHNELANYLLTLGDCFFVENMSYCDLVHRANKTEISEKTGRYKRKKRFGKSIANKAPAMLITMLKQKCQSRGLEGVKEVDTHVRASQYNHQTDICIEKALENRWNVMPDGERIQRDLYSAFLLQHCKQGLPEYNRKELKKEFGEELYRVFDREALQRDYPQFVAYHHMTVQRLSELPHTIPSMGIRRIIS

SEQ ID NO: 2293 - protein, 595 aa, unidentified
  REGION 1..595: note = Category: MG81 effectors
  REGION 1..595: note = Description: MG81-573 effector
  source 1..595: note = uncultivated organism sequence
MVDLKKQLCSSASNSENQGVRFQTVVLYTKFVHKSVQLSPESSVFAVALFVRMMYNTKYQAKRGDPVGEKKNNNNNNTDTCVLTLPLRVEKWQEDCLLKRFEAARRIYNSLLNFELKKLRQLERTVEYRQIQSVISSAYRSNTKDSPECKAALKRREKLIDENGLTKNGFKNDVKFFYKHFDGLIGSSVAVHCIAVQLWAAFNKYLCGNGKEIHFKRLGDISSLKGYSVKGKSGGCEIIFRGQYVEWTRKKKKLLLPLKIDPDNEYEREMLSRRVKYVRIIKKPGKNRLRWYAQLTLEGKPALKYSAETGKPIHSVGKGDVGIDIGPQTVAYASDKEVALLELADRVTNIEHQKKKLQRKLDRSRRATNPDNYKPDGTIKRGVKLTRNKSKRYLKLQSKLAYIQHRQAEIRKLQHTCLANHMLTLGDRFFVEKMNWPGLAHRAKETSISEKTGRYKRKKRFGKSLANKAPAMFISILKQKCETLGLPGVVEVDTFRLKASQYNHLSDTCEKKSLSERWNYMPISDGSDSSKTKRIQRDLYSAFLLQHTIPQSCSFDKEALRIDYPNFVTMHDAEIHRLESLPKTITSMGVRRSHS

SEQ ID NO: 2294 - protein, 511 aa, unidentified
  REGION 1..511: note = Category: MG81 effectors
  REGION 1..511: note = Description: MG81-574 effector
  source 1..511: note = uncultivated organism sequence
MKKSNTDTCCLTLPLKLEKWQEDRLAKRFEIARQIYNTMVHAELKKLRNIENSQPYRQIQKQIEALNWKNQNDKARLKSLYNDRNKLLNTIGFSEYGFKADIKYYYKHFNDNIGSSVAVHGIAPQVWAAFEKMLFHKEGKKVHYKKKDDIHSLHGYSVTGKSGGVEIIFRKTYIEWKGLKLPLKRSPDNAYETEMLGRRVKYVRLLRKPGKRKDCWYAQLSLKGKPAIKRDPESGKRRHSIGRGAVGLDIGPQTLAYSACGAADLVELADQVQNIEQMKRRLQRKLDRSRRATNPDNYADNGTIRRGVKLTHNKSNRYRRTQRELRYLQHCQAEIRKRQHIELANHLLALGDCFYVEDMAWPSLTHRAKETAISEKTGRIKRKKRFGKSVANKAPATLIGILEQKCNSLGLPGVVKVPTSLRASQYNHQSGEYTSKPLSQRWNNMPDGERIQRDLYSAFLLQHYDSKAGNFDSALLQQDYPQFVQYHHRAIQRLSTVPKTLSSMGIQRSLR

SEQ ID NO: 2295 - protein, 511 aa, unidentified
  REGION 1..511: note = Category: MG81 effectors
  REGION 1..511: note = Description: MG81-575 effector
  source 1..511: note = uncultivated organism sequence
MGKSSTDTCCLTLPLKLEKWQEDRLAKRFEIARQIYNTMVRAELKKLERVKQLPEYRKNQKEIQALDWKNSADKQRLKELYGNQRKILQKQGFTEYGFKADSKDYYKHFIENIGSSVATHGIAPQVWNAFDKMLFQKDWKVVHFKRHGDVHSLKGGSVTHKSGGAEIMFRKTYIEWKGLKLPLKLSPNNAYEAEMLSYRVKYVRILRTRGKTKDRWYAQLSLEGKPAVKYDSNTGKPVHPVGRGAVGLDIGPQTLAYAAADEANLVELADQVQNIEQEKRRLQRKLDRSRRATNPDNYNENGTIRRGVKLTHNKSKRYCKLQKELSWIQHCQAETRKRQHIALANHLLSLGDCFYVEPMAWPSLTHRAKKTEVSEKTGKIKRKKRFGKSVANKAPASLIGILKLKCISLGLTGVVEVPMLLRASQYNHQSKDYEKKSLSQRWNNMPDGNRIQRDLYSAFLLQHYDSQSESFDQETLERDYPQFVRLHNQTIQRLSALPKTPSSMGIRRSVS

SEQ ID NO: 2296 - protein, 512 aa, unidentified
  REGION 1..512: note = Category: MG81 effectors
  REGION 1..512: note = Description: MG81-576 effector
  source 1..512: note = uncultivated organism sequence
MPTKQKEGGNRCVLTLPLLTEPWQEHIIEKRFKIIEHLKNQLISIELRKLKNLQRTKAYKNLIKQIESVPKSERTALYKERNKMLKDAGFSQYTFMDDMAGKKSLMQKHFESHINVQIAHKAAIDVWSAFEKFLFGSGQMIHYQKRGTLSSVASKSPKTGMFYYSDENIFKWSGGGTKPKGGIILCLRVASVKTNYEKEMVANNEIKYYRVVRKWMKTKYKYYLQITFAGKPADKHREISTGRVGIDIGTQTIAIASDKSVKLLELADKVNKNHIKKCELQRKLDRSRRYTNPDNFNPDGTVKRGTKGHKLKWNKSKHYLEVAGKIRELERKNADIRKYQHTCLANDILAMGNQIYIEPMNYKGLQKRAKETQVDEKGRYKKKKRFGKSLANKAPAMFVTILKTKAEQHGGEVYEVDIMSYRASQCDHTTGEYTKHGLNDRWRILGNGDKVQRDLYSAFLIKNSNKTHDEIDLDKCSKTYDSFKKLHDKEIENIRNEVILRKRRNISSYGIA

SEQ ID NO: 2297 - protein, 529 aa, unidentified
  REGION 1..529: note = Category: MG81 effectors
  REGION 1..529: note = Description: MG81-577 effector
  source 1..529: note = uncultivated organism sequence
MILLAKKNNNDTDTCVLTLPLRVEKWQEDCLLKRFEAARRIYNSLLNFELKKLRQLERTVEYRQIQSVISSAYRSNTKDSPECKAALKRREKLIDENGLTKNGFKNDVKFFYKHFDGLIGSSVAVHCIAVQLWAAFNKYLCGNGKEIHFKRLGDISSLKGYSVKGKSGGCEIIFRGQYVEWTRKKKKLLLPLKIDPDNEYEREMLSRRVKYVRIIKKPGKNRLRWYAQLTLEGKPALKYSAETGKPIHSVGKGDVGIDIGPQTVAYASDKEVALLELADRVTNIEHQKKKLQRKLDRSRRATNPDNYKPDGTIKRGVKLTRNKSKRYLKLQSKLAYIQHRQAEIRKLQHTCLANHMLTLGDRFFVEKMNWPGLAHRAKETSISEKTGRYKRKKRFGKSLANKAPAMFISILKQKCETLGLPGVVEVDTFRLKASQYNHLSDTCEKKSLSERWNYMPISDGSDSSKTKRIQRDLYSAFLLQHTIPQSCSFDKEALRIDYPNFVTMHDAEIHRLESLPKTITSMGVRRSHS

SEQ ID NO: 2298 - protein, 511 aa, unidentified
  REGION 1..511: note = Category: MG81 effectors
  REGION 1..511: note = Description: MG81-578 effector
  source 1..511: note = uncultivated organism sequence
MKKSNTDTCCLTLPLKLEKWQEDRLAKRFEIARQIYNTMVHAELKKLRNIENSQPYRQIQKQIEALNWKNQNDKARLKSLYNDRNKLLNTIGFSEYGFKADIKYYYKHFNDNIGSSVAVHGIAPQVWAAFEKMLFHKEGKKVHYKKKDDIHSLHGYSVTGKSGGVEIIFRKTYIEWKGLKLPLKRSPDNAYETEMLGRRVKYVRLLRKPGKRKDCWYAQLSLKGKPAIKRDPESGERRHSIGRGAVGLDIGPQTLAYSACGAADLVELADQVQNIEQMKRRLQRKLDRSRRATNPDNYADNGTIRRGVKLTHNKSNRYRRTQRELRYLQHCQAEIRKRQHIELANHLLALGDCFYVEDMAWPSLTHRAKETAISEKTGRIKRKKRFGKSVANKAPATLIGILEQKCNSLGLPGVVKVPTSLRASQYNHQSGEYTSKPLSQRWNNMPDGERIQRDLYSAFLLQHYDSKAGNFDSALLQQDYPQFVQYHHRAIQRLSTVPKTLSSMGIQRSLR

SEQ ID NO: 2299 - protein, 511 aa, unidentified
  REGION 1..511: note = Category: MG81 effectors
  REGION 1..511: note = Description: MG81-579 effector
  source 1..511: note = uncultivated organism sequence
MAKKSATDTCCLTLPLLTEKWQSDRLEKRFEIARQIYNTLLNYELKKLRRLEQSAEYTAIQAAIQKSYEAGKTDKAELKSLFQEREKLRRAAGFSEYDFKTDIKTFYKHFNDNIGSSVAVHGIAPQVWQGFDQLFYGNGKAVHFKRRGDIKSLRGYSVAGKSGGVEIIFRGSYIEWKGLKLSLKLGKNNAYEAEMLQKRVKYCRIVKKAGKHKTHWYVQLMLEGTPAQKCDVNTGELRHPVGRGAVGIDIGPQTIAYAAEAEVALKELADGVKNIEQEKRLLQRKLDRSRRSTNPDNFAADGTIKRGVKLNWHKSKRYIRLQHELAVLQRQQAEVRKRQHTELANHLLSLGDRFYVEDMEWPALTHRAKETAISEKTGRYKRKKRFGKSVANKAPAMLIAILDQKLRSRGLDGVIKVKTSVRASQFNHMTGEYQKKSLAQRWNDMPDGRRIQRDLYSAFLLQHMNAAQDGFDVAALNRDYENFAVLHKRVIEELRTASKTLSSMGITRSVS

SEQ ID NO: 2300 - protein, 587 aa, unidentified
  REGION 1..587: note = Category: MG81 effectors
  REGION 1..587: note = Description: MG81-580 effector
  source 1..587: note = uncultivated organism sequence
MRNGNKPTDGLLWYPRRAVFDTSHQKRPCALRGGTGEYDVGWARSRWRTALTTGTGACHAPVGGGERTDSPTEVGRHPDAFEVTLPRLFAFGFGCGGFVLGEAFMADHRKIYNTMVRAELKKLDRVKQLPEYRKNQKEIQALDWKNSADKQRLKEQYGNQRKILQKQGFTEYGFKADSKDYYKHFIENIGSSVATHGIAPQVWNAFDKMLFQKDGKVVHFKRYGDVHSLKGGSVAQKSGGAEIMFRKTYIEWKGLKLPLKLSPNNAYEAEMLSYRVKYVRILRTRGKTKDRWYAQLSLEGKPAVKYDSNTGKPVHPVGRGAVGLDIGPQTLAYAAANEANLVELADQVQNIEQEKRRLQRKLDRSRRATNPDNYNENGTIRKGVKLTHNKSKRYCKLQKELSWIQHYQAETRKRQHIALANHLLSLGDCFYVEPMAWPSLTHRAKKTEISEKTGKIKRKKRFGKSVANKAPASLIGILKLKCISLGLTGVVEVPMLLKASQYNHQSKDYAPKSLSQRWNDMPDGNRIQRDLYSAFLLQHHDSQSESFDQETLERDYPQFVRLHNQTIQRLSALPKTPSSMGIRRSVS

SEQ ID NO: 2301 - protein, 525 aa, unidentified
  REGION 1..525: note = Category: MG81 effectors
  REGION 1..525: note = Description: MG81-581 effector
  source 1..525: note = uncultivated organism sequence
MANNNNNTDTCVLTLPLRVEKWQEDCLLKRFEAARRIYNSLLNFELKKLRQLERTVEYRQIQSVISSAYRSNTKDSPECKAALKRREKLIDENGLTKNGFKNDVKFFYKHFDGLIGSNVAVHCIAVQLWAAFDKYLRGSGKEIHFKRLGDISSLKGYSVKGKSGGREIIFRGQYIEWTRKKKKLLLPLKIDPDNEYEREMLSRRVKYVRIIKKPGKNRLRWYAQLTLEGKPALKYSAGTGKPIHSVGKGNVGIDIGPQTVAYASDKEVALLELADRVTNIEHQKKKLQRKLDRSRRATNPDNYKPDGTIKRGVKLTRNKSKRYLKLQSKLAYIQHRQAEIRKLQHTCLANHMLTLGDRFFVEKMNWPGLAHRAKETSISEKTGRYKRKKRFGKSLANKAPAMFISILKRKCETLGLPGVVEVDTYSLKASQYNHLSDTYEKKSLSERWNYMPISDGSDSSKTKRIQRDLYSAFLLQHTIPQPCSFDKEALRIDYPNFVTMHDAEIHRLESLPKTVTSMGVRRSHS

SEQ ID NO: 2302 - protein, 499 aa, unidentified
  REGION 1..499: note = Category: MG81 effectors
  REGION 1..499: note = Description: MG81-582 effector
  source 1..499: note = uncultivated organism sequence
MLTAYNLEVNRLRDDYWKRRHDEDISDADIKKELNALAKEDKRYKQLNYGAFGTQYLTPEKKRHEQAEHRIENGEDPSVVWNQETERSANPWLHTANQRVLVSGLQNASDAWDNFWASRTGKRAGRLVGTPRFKKKGVSRDSFTVPAPEKMGAYGTAYLRGEPAYKQGRRKITDYRHVRLSYLGTIRTFNSTKPLVKAVVAGAKIRSYTVSRNADRWYVSFLVKFSEPIRRSATKRARAAGSVGVDLGVKYLASLSDSEAPQRFPNLKFVEGLPSLENPRWSEASSRRLHKLQRALARSQKGSNRRSRLVKQIARLHHMTALRRESNLHQLTKKLATEYTLVGFEDLNVSGMTASAKGTVENPGKNVAQKSGLNRVVLDAAFGVFRNQLEYKAVWYGSAFEKVDRYFASSQTCSECGRKAKTKLTLRDRVFDCAYCGNMMDRDLNAAVNICREAQRLFDEKLASEDRESLNGRGSRGALRGAETVEASRPPASHRRGSP

SEQ ID NO: 2303 - protein, 538 aa, unidentified
  REGION 1..538: note = Category: MG81 effectors
  REGION 1..538: note = Description: MG81-583 effector
  source 1..538: note = uncultivated organism sequence
MNNEEKEKDGATCCLTLPLKLEKWQSDHLEKRFEIARQLYNTLVHAELKKKCQVERMPEYQEIMKMIDAASNQKEKWALEKKRKAFLEENGFSRNAFKADMEKYYKHFNDNIGANVALHGITAQVWIAFDKVFVDNYKQKGKVHFKKPGELCSVQGYSQKKSGGKEIMFREDRIIWNQQGNRDRKKVKREFLLKLSPDNPYEAEMLKRHVKFVRILRKDGKTKPHWYAQLVLEGKPAVKRDSISGAPKHPVGHGVVGIDIGTRTLAYSTDKEVNLLELADRVQNIEQEKRRLQRKMDRSRRAMNPGNYKPDGSIKQGVKLTWNNSKRYKRIQHQYAMIQHHQADIRKQQHNELANYLLTLGDCFFVENMSYCDLAHRANKTEISEKTGRYKRKKRFGKSIANKAPAMLITMLKQKCQSRGLEGVKEVDTHVCASQYNHQTDTCIKKALENRWNIMPDGERIQRDLYSAFLLQHCRRDLPEYNRKELQKEFGEELYRVFDREALQRDYPQFVAYHHMTIQRLSELPHTIPSMGIRRIIS

SEQ ID NO: 2304 - protein, 511 aa, unidentified
  REGION 1..511: note = Category: MG81 effectors
  REGION 1..511: note = Description: MG81-584 effector
  source 1..511: note = uncultivated organism sequence
MKKSNTDTCCLTLPLKLEKWQEDRLAKRFEIARQIYNTMVHAELKKLRNIENSQPYRQIQKQIEALNWKNQNDKARLKSLYNDRNKLLNTIGFSEYGFKADIKYYYKHFNDNIGSSVAVHGIAPQVWAAFEKMLFHKEGKKVHYKKKDDIHSLHGYSVTGKSGGVEIIFRKTYIEWKGLKLPLKRSPDNAYETEMLGRRVKYVRLLRKPGKRKDCWYAQLSLEGKPAIKRDPESGERRHSIGRGAVGLDIGPQTLAYSACGAADLVELADQVQNIEQMKRRLQRKLDRSRRATNPDNYADNGTIRRGVKLTHNKSNRYRRTQRELRYLQHCQAEIRKRQHIELANHLLALGDCFYVEDMAWPSLTHRAKETAISEKTGRIKRKKRFGKSVANKAPATLIGILEQKCNSLGLHGVMKVPTSLRASQYNHQSGEYTSKPLSQRWNNMPDGERIQRDLYSAFLLQHYDPKAGNFDSALLQQEYPQFVQYHHRAIQRLSAVPKTLSSMGIQRSLR

SEQ ID NO: 2305 - protein, 538 aa, unidentified
  REGION 1..538: note = Category: MG81 effectors
  REGION 1..538: note = Description: MG81-585 effector
  source 1..538: note = uncultivated organism sequence
MNNEEKEKDGATCCLTLPLKLEKWQSDHLEKRFEIARQLYNTLVHAELKKKCQVERMPEYQEIMKMIDAASNQKEKWALEKKRKAFLEENGFNRNAFKADMEKYYKHFNDNIGANVALHGITAQVWIAFDKVFVDNYKQKGKVHFKKPGELCSVQGYSQKKSGGKEIMFREDRIIWNQQGNRDRKKVKREFLLKLSPDNPYEAEMLKRHVKFVRILRKDGKTKPHWYAQLVLEGKPAVKRDSASGAPKHPVGHGVVGIDIGTRTLAYSTDKEVNLLELADRVQNIEQEKRRLQRKMDRSRRATNPENYNPDGTFKRGVKLTRNKSKRYRRIQHQLAMIQHHQADIRKQQHNELANYLLTLGDCFFVENMSYCDLVHRANKTEISEKTGRYKRKKRFGKSIANKAPAMLITMLKQKCQSRGLEGVKEVDTHVRASQYNHQTDICIEKALENRWNVMPDGERIQRDLYSAFLLQHCKQGLPEYNRKELKKEFGEELYRVFDREALQRDYPQFVAYHHMTIQRLSELPHTIPSMGIRRIIS

SEQ ID NO: 2306 - protein, 522 aa, unidentified
  REGION 1..522: note = Category: MG81 effectors
  REGION 1..522: note = Description: MG81-586 effector
  source 1..522: note = uncultivated organism sequence
MKRSSTDTCCLTLPLKLEKWQSDRLEKRFEIGRQIYNTIVHAELKKLRKLERTQQYQEIEQKLENAKQEETKELWKKKRQLLDQNGLSEDHFKADMKYYYPHFKDNIASNVAVHGIASQAWTAFEKVLFSKDGKMVHFKKKGELSSLRGYSRAGKSGGVEIIFRGSYVEWKGLKLPLKLSPDNDYETEMLSKRVKYVRILRKDGKTKTHWYAQLALEGKPAVKRDSISGAPKHPVGHGVVGIDIGTRTLAYSTDSEVNLLELADRVQNIEQEKRRLQRKMDRSRRAMNPGNYKPDGSIKQGVKLTWNNSKRYKRIQHQYAMIQHHQADIRKQQHNELANYLLTLGDCFFVEDMSYCDLVHRANKTEISEKTGRYKRKKRFGKSIANKAPAMLITMLKQKCQSRGLEGVKEVDTHVRASQYNHQTDTCIEKALENRWNVMPDGERIQRDLYSAFLLQHCKQGLPEYNRKELKKEFGEELYRVFDREALQRDYPQFVAYHHMTIQRLSELPHTIPSMGIRRIIS

SEQ ID NO: 2307 - protein, 508 aa, unidentified
  REGION 1..508: note = Category: MG81 effectors
  REGION 1..508: note = Description: MG81-587 effector
  source 1..508: note = uncultivated organism sequence
MADKECCVLTLPLQTENWQEHIIEKRFAIMEHLKNQLIAKELRRLKNLERTKEYRILIDEINNTPKEKRKALFSKRRKLLKDSGFNRNKFKDDMAVMQKHFEEHIATQIAQEAASDVWRSFDKYLFNNGKYIHFTRKGSLSSINCQKINNGMKYIDGYFIWTCGICSGKRDRRIILKIKVTPPKNEYEKEMLSKKIKYLRIVKKWVKTRYKYYLQFALEGKPVKKDRIVNKGNVGIDIGTQTVAISSADSVKLLELADKIDKNHTKKKILQRKMDRSRRYTNPQNYNEDGTIKKPPKGQRYCWYKSKKYIQLAGKVRELERKNADIRKYQHTCLANWILSLGDTVYVEQMNFSGLQRRAKETKIDKNGKYAKKKRYGKSLANKAPSMFLTILESKLNQYGGQLNKINTYEFKASQYDHTDDTFTKHNRSERWHILSNGDKNQRDLYSAFLIMNSDISLEHCNREKCNETYSNFKVLQDKEIERLYSDIRKGNCKNISSFGFQRNAKAM

SEQ ID NO: 2308 - protein, 534 aa, unidentified
  REGION 1..534: note = Category: MG81 effectors
  REGION 1..534: note = Description: MG81-588 effector
  source 1..534: note = uncultivated organism sequence
MGWKSKGRGGTLVKRSSTDTCCLTLPLKLEKWQSDRLEKRFEIGRQIYNTIVHAELKKLRKLERTQQYQEIEQKLENAKQEETKELWKKKRQLLDQNGLSENHFKADMKYYYPHFKDNIASSVAVHGIASQAWTAFEKVLLSKDGKMVHFKKKGELSSLRGYSQAGKSGGIEIIFRGSYVEWKGLKLPLKLSPDNDYETEMLSKRVKYVRILRKDGKTKTHWYAQLALEGKPAVKRDSISGAPKHPVGHGVVGIDIGTRTLAYSTDKEVNLLELADRVQNIEQEKRRLQRKMDRSRRAMNPGNYKPDGSIKQGVKLTWNNSKRYKRIQHQYAMIQHHQADIRKQQHNELANYLLTLGDCFFVENMSYCDLAHRANKTEISEKTGRYKRKKRFGKSIANKAPAMLITMLKQKCQSRGLEGVKEVDTHVCASQYNHQTDTCIKKALENRWNIMPDGERIQRDLYSAFLLQHCRRDLPEYNRKELQKEFGEELYRVFDREALQRDYPQFVAYHHMTIQRLSELPHTIPSMGIRRIIS

SEQ ID NO: 2309 - protein, 521 aa, unidentified
  REGION 1..521: note = Category: MG81 effectors
  REGION 1..521: note = Description: MG81-589 effector
  source 1..521: note = uncultivated organism sequence
MLILGRRMYMPTKQKEDSNRCVLTLPLLTEPWQEHIIEKRFKIIEHLKNQLISIELRKLKKLQRTKAYKNLIKQIESVPKSERTALYKERNKMLKDAGFSQYTFMDDMAGKKSLMQKHFESHINVQIAHKAAIDVWSSFEKFLFGTGQIVHYQKRGTLSSVASKSPKTGMFYYPDENIFKWSGGGTKPKGGIILCLRVASVKTNYEKEMVANNEIKYYRVVRKWMKTKYKYYLQITFAGKPADKHREISTGRVGIDIGTQTIAIASDKSVKLLELADKVNKNHIKKCELQRKLDRSRRYTNPDNFNPDGTVKRGTKGHKLKWNKSKHYLEIAGKIRELERKNADIRKYQHTCLANDILAMGNQIYIEPMNYKGLQKRAKETQVDEKGRYKKKKRFGKSLANKAPAMFVTILKTKAEQHGGEVYEVDIMSYRASQCDHTTGEYTKHGLNDRWRILGNGDKVQRDLYSAFLIKNSNKTHDEIDLDKCSKTYDSFKKLHDKEIENIRNEVILRKRRNISSYGIA

SEQ ID NO: 2310 - protein, 512 aa, unidentified
  REGION 1..512: note = Category: MG81 effectors
  REGION 1..512: note = Description: MG81-590 effector
  source 1..512: note = uncultivated organism sequence
MPTKQKEGGNRCVLTLPLLTEPWQEHIIEKRFKIIEHLKNQLISIELRKLKNLQRTKAYKNLIKQIESVPKSERTVLYKERNKMLKDAGFSQYTFMDDMAGKKSLMQKHFESHINVQIAHKAAIDVWSSFEKFLFGTGQIVHYQKRGTLSSVASKSPKTGMFYYSDENIFKWSGGGTKPKGGIILCLRVASVKTNYEKEMVANNEIKYYRVVRKWMKTKYKYYLQITFAGKPADKHREISTDRVGIDIGTQTIAVASDKSVKLLELADKVNKNHIKKCELQRKLDRSRRYTNPDNFNPDGTVKRGTKGHKLKWNKSKHYLEIAGKIRELERKNADIRKYQHTCLANDILAMGNQIYIEPMNYKGLQKRAKETQVDEKGRYKKKKRFGKSLANKAPAMFVTILKTKAEQHGGEVYEVDIMSYRASQCDHTTGEYTKHGLNDRWRILGNGDKVQRDLYSAFLIKNSNKTHDEIDLDKCSKTYDNFKKLHDKEIENIRNEVILRKRRNISSYGIA

SEQ ID NO: 2311 - protein, 511 aa, unidentified
  REGION 1..511: note = Category: MG81 effectors
  REGION 1..511: note = Description: MG81-591 effector
  source 1..511: note = uncultivated organism sequence
MKKSNTDTCCLTLPLKLEKWQEDRLAKRFEIARQIYNTMVHAELKKLRNIENSQPYRQIQKQIEALNWKNQNDKARLKSLYNDRNKLLNTIGFSEYGFKADIKYYYKHFNDNIGSSVAVHGIAPQVWAAFEKMLFHKEGKKVHYKKKDDIHSLHGYSVTGKSGGVEIIFRKTYIEWKGLKLPLKFSPDNAYETEMLGRRVKYVRLLRKPGKRKDCWYAQLSLEGKPAIKRDPESGKRRHSIGRGAVGLDIGPQTLAYSACGAADLVELADQVQNIEQMKRRLQRKLDRSRRATNPDNYADNGTIRRGVKLTHNKSNRYRRTQRELRYLQHCQAEIRKRQHIELANHLLALGDCFYVEDMAWPSLTHRAKETAISEKTGRIKRKKRFGKSVANKAPATLIGILEQKCNSLGLPGVMKVPTSLRASQYNHQSGEYTSKPLSQRWNNMPDGERIQRDLYSAFLLQHYDPKAGNFDSALLQQDYPQFVQYHHRAIQRLSTVPKTLSSMGIQRSLR

SEQ ID NO: 2312 - protein, 359 aa, unidentified
  REGION 1..359: note = Category: MG81 effectors
  REGION 1..359: note = Description: MG81-592 effector
  source 1..359: note = uncultivated organism sequence
MKATKTLQLRIKDKHAKVLVAMAREVNQAWNHVNEVSAKAARPFHGKPKYLSGYDLQKCTAGYSKCDGVSVGSGTVQLVCAEYATRRKQFKKTRLNWRISNPKSSKYSLGWIPFKGGHAKYKAGQIHFAGQKFSLWDSYGLSKYELRGGSFTEDSRGRWYFNVAVEVECQPSPATASVGIDLGLKDCATDSNGKQLHGRWYRNHELALAKAQRANKKKRVKTIHAKIKNQRKDDMHQFSTQLVKNNAAIFVGDVASAKLVKTKMAKSTLDAGWSSLKTMLEYKSHQAGIVFEVVSESYSTQTCSCCGAIPASSPKGRAGLRIREWTCSDCGAEHDRDVNAARNILAAGHRRLAEGIPVL

SEQ ID NO: 2313 - protein, 505 aa, unidentified
  REGION 1..505: note = Category: MG81 effectors
  REGION 1..505: note = Description: MG81-593 effector
  source 1..505: note = uncultivated organism sequence
MAKATSDTCCLTLPLKLEKWQEDRLAKRLKIARQIYNTLLHFELKKLRRLEASEEYLAIQEKLKEVTDKTERNKLYKQLDKLRRDTGFTEYAFKTDIKEFYKHFSDNIGSAVAVHGIAAQVWVAFDKLFYGSGKAVHFKRHGELNSLRGYSVAGKSGGVEIMFRETYIEWKGLKLPIKLDPNNAYEQEMLQYRIKYCRIIRKPEKSKNHWYVQLSLEGKPVIKCNKETGEILHPVGSGAVGIDIGPQTIAYASESEVALKELADQVNNIEQEKRILQRKLDRSRRATNPDNYNPDGTIKRGVKLTRNKSKRYQKCQRELADIQHRQADIRKRQHNELANHLLSLGNRFYVEDMEWPALTHRAKKTEVSEKTGRFKRKKRFGKSIANKAPATLTNLLDLKLKSRGLGGVVHVDTKVRASQYNHLTDDYHKKELNERWNAMPDGRRIQRDLYSAFLLQHMNEKLDGFDKEALTRDYEQFAALHDDCIDALKKAPKTLASMGIVRRTS

SEQ ID NO: 2314 - protein, 1302 aa, unidentified
  REGION 1..1302: note = Category: MG81 effectors
  REGION 1..1302: note = Description: MG81-594 effector
  source 1..1302: note = uncultivated organism sequence
MKISKVNHVKTGTRIKENNGEGVLYANPSKQANAVKDLSKHIQDVNKKAQGLYSPLNPVKALINPKMPKEKKDEINGSYKAFKSVVNDIIKENEAGIPDSASVIRALYEKAKKTDLKVSDASNLSSKMIDKCLRKSLESKSEIAKEILRAIISSDKSTVNSLNAEEVKAFFELVHKDYYKIEQLKAIEKSIENKDVKVQVKTGNDGEKHLVLSNADNAKKHFYFDFVKEFAAKDKIEREEMIIRFRQLIILFYSGVESYKLSIGSDVGAWTFGSSLPEVTDNFDDEIASLISEYNNNIANKENIQKSIDLKSNQMKNYKFNSPEYKKLDDQISKLKDDQGDCKYAISDAKRKIKVLVEKLICIKYRDAINAEGITDSDVFWIGYIQQVAQKQFSKKDAYNNYRISTKYLYEVTFNEWISFMASKYIDLGKAVYHFAMPDFSDIKSGKEIYAGKVQPIFENGITSFDYERIKAKETLARDFSVYATYASGIFSNAVTDSDYRLKDEKEDALFYKQEDWEQALLPDAKKKLLMYFGGQSKWEDSEIENVSDLEMTKAFQDMINVIRNSNYHYAGSVLEPNEQSTNIAKMLFDKEFSWLGKIIREKYLSNNVPVYYNVEDINKMMTYLYQGESKREAQIPSFGNVLKKKEMPGFVTKYIPGNLLAKFDSAGVDKFRASLYFVLKEAYYYGFLNETNLKGRFIKALNDSEKNAKNPEAIENFKARINDMDDSCSFGEICQMLMTDYNLQNQSEYKVKSQIEQNQDEKDNKGHKYSHFKMLLYITLQKAFIDYIVEKQDIYGYIKAPIFKSNYFDGDEPQKFVESWEANLFGDVKITTETDPYFLAWYVLSHMLPAKQVNQLQGGIKSYIQFVTDINRREKSVIGTEKDDSLVNSIAYYQNILKVLEFVMCFVGKTSNVLSDYFADEDDYALHLYSYVGFASKKEEKTNSTLSGFCSKSITKAGKELTDRIGIYHDGTNPIVNNNVVKALMYGNENVLSEAVTRVSADLINGEITKYYEVKKKLEKVFEKGECSNEEEQKDLREFQNLKNRIELQDISIFTEIINDYMSELVNMAYLRERDLMYYQLGFNYIRLEYGNVEDKYKELQGDNINIKSGALLYQIVALYTHELPIVYKDKDSYKYTNNGKIGRFVKSYCEEEFSDLDNAYLKGLELFEDINLHDDLHLFRNEIDHLKYFIRADKSILQMYSRIYNGFFSYDLKLKKSVSYIFANILAKYFVIADTEMKSSVENGKRVAMLSIKGLESDVFNYKGKKLDKEGKERDSKYTLPVRSDEFLKEIKKLLNYKSI

SEQ ID NO: 2315 - protein, 512 aa, unidentified
  REGION 1..512: note = Category: MG81 effectors
  REGION 1..512: note = Description: MG81-595 effector
  source 1..512: note = uncultivated organism sequence
MKKSSTDTCCLTLPLKLEKWQEDRLAKRFEIARQLYNTLVHAELKRLVQIKRTAEYLENEQKIRALDRNNPADRAKLQELYKEQRKSLKTAGFTDYSFTTDMGKYYKHFRDNIGSSVAVHGIAPQVWAAFDKVLFKKGGKKVHYKRPGEVNSVQGYSRTGKSGGREIMFRGAYIEWKGLKLPLKLSPDNAYETDMLQRRLKLVRLVRRPGKRRDRWYAQLVLEGKPAIKADPVTGKAVHPIGSGPVGLDIGPQTLAYSAAGVAGLVELADRVQNIEQEKRCLQRKMDRSRRAANPDNYAEDGTIRRGVKLTHNKSKRYRRSQQELKYLQHRQAEIRKLQHIQLANHLLSLGDHFYVEKMEWSSLTHRAKKTVISEKTGKPRSKKRFGKSIANKTPAMLIEILRQKCKSLGLSDVVEINPADIKASQYNHLTGEYVKKSLSRRWNDMQDGEHLQRDLYSAFLLQHYDSMSKALDLDSLARDYPAFVQYHHREIERLHALPKTPSSMGIRRSIA

SEQ ID NO: 2316 - protein, 355 aa, unidentified
  REGION 1..355: note = Category: MG81 effectors
  REGION 1..355: note = Description: MG81-596 effector
  source 1..355: note = uncultivated organism sequence
MILVYRYRVKSLNGLLNKQSRAVNFVWNFCNDRQKDALRFGRRWHTGFDLNKLTAGSSKELGLHSGTVNAVCEQYAKSRSQKKRPFLRYRGKRSLGWVPLKGRELKLEGIFFRFACNTFRVFNSRALPEGKIKDGTNFSRDSRGNWFLNIVIDVDVVAPDARAPVRGVGIDLGLKDFATLSTGEKIQAQHIYRGAQQALAVAQRANKKKRVKAIHAQIANRRNDFHHKLSTRIVREFDYIAVGNVNAAGLAKTSMAKSVLDAGWSSFRTQLAYKAVKHGAWFEEVNEAFSTQTCSDCGSMPDSRPKGIAGLGIRSWICSVCGGVHDRDVNAAKNILNKLGSRAGHGTPVVGIPVL

SEQ ID NO: 2317 - protein, 522 aa, unidentified
  REGION 1..522: note = Category: MG81 effectors
  REGION 1..522: note = Description: MG81-597 effector
  source 1..522: note = uncultivated organism sequence
MKKSSTDTCCLTLPLKLEKWQSDRLEKRFEIGRQIYNTVVRAELKKLQQVERTPQYREIEQKLKKAKQEEAKELWKTRTQLLSKSGFSEYGFKSDMKYYYQHFKENIGSSVAVHGIASQVWTAFEKVLFSKDGKMVHFKKKGELSSLRGYSQAGKSGGIEIIFRGSYVEWKGLKLPLKLSPDNDYETEMLSKRVKYVRILRKEGKTKPHWYAQLVLEGKPAIKRDPASGAPKHPVGHGVVGIDIGTRTLAYSADSKVDLIELADRVQNIEQEKMLLQRKLDRSRRATNPENYKPDGTIKKGVKLTRNKSKRYRKIQHQLAMLQHRQADIRKRQHNELANYLLTLGDCFFVEDMDYRALTRKAKKTEISEKTGRYKRKKRFGKSIANKAPSMLIALLDQKCKSLNLEGVKKVDTAVKASQYNHQTDECKAKELKERWNIMPDGERIQRDLYSAFLLQHCRRDLPEYNRKKLQETFGNELYRVFDREALQRDYPKFVEYHRETIQRLSALPKTIASMGIRRSIS

SEQ ID NO: 2318 - protein, 512 aa, unidentified
  REGION 1..512: note = Category: MG81 effectors
  REGION 1..512: note = Description: MG81-598 effector
  source 1..512: note = uncultivated organism sequence
MKKSSTDTCCLTLPLKLEKWQEDRLAKRFEIARQLYNTLVHAELKRLVQIKRTAEYRENERKIRTLDWNNPAHRTELEKLYEERRKSLKKAGFTDNSFTTDMGKYYKHFRDNIGSSVAVHGIAPQVWAAFDKLLFKKGGKKVHCKRPGEVNSVQGYSRTGKSGGREIMFRGAYIEWKGLKLPLKLSPDNAYETDMLQRRVKLVRLVRRPGKRRDRWYAQLVLEGKPAIKADPVTGKAVHPIGSGPVGLDIGPQTLAYSAAGVAGLVELADRVQNIEQEKRCLQRKMDRSRRATNPDNYAEDGTIRRGVKLTHNKSKRYRRNQQELKYLQHRQAEIRKLQHIQLANHLLSLGDHFYVEKMEWSSLTRRAKKTVISEKTGKPRSKKRFGKSIANKAPAMLIEILRQKCKSLGLPNVVEINPADIKASQYNHLTGEYVKKSLSRRWNDMQDGEHLQRDLYSAFLLQHYDSMSKALDLDSLARDYPAFVQYHHREIERLHALPKTPASMGIRRSIA

SEQ ID NO: 2319 - protein, 511 aa, unidentified
  REGION 1..511: note = Category: MG81 effectors
  REGION 1..511: note = Description: MG81-599 effector
  source 1..511: note = uncultivated organism sequence
MGKSSTDTCCLTLPLKLEKWQEDRLAKRFEIARQIYNTMVRAELKKLDRVKQLPEYRKNQKEIQALDWKNSADKQRLKELRANQNRILQKQGFTEYGFKADSKDYYKHFIENIGSSVATHGIAPQVWNAFDKMLFQKDGKVVHFKRYGDVHSLKGGSVAHKSGGAEIMFRKTYIEWKGLKLPLKLSPNNAYEAEMLSYRVKYVRILRTRGKTKDRWYAQLSLEGKPAVKYDSSTGKPVHPVGRGAVGLDIGPQTLAYAAANEANLVELADQVQNIEQEKRRLQRKLDRSRRATNPDNYNENGTIRRGVKLTHNKSKRYCKLQKELSWIQHCQAETRKRQHIALANHLLSLGDCFYVEPMAWPSLTHRAKKTEVSEETGRIKRKKRFGKSVANKAPASLIGILKLKCISLGLTGVVEVPMLLRASQYNHQSKDYAKKSLSQRWNDMPDGNRIQRDLYSAFLLQHYNSQLENFDQETLERDYPQFVRLHNQTIQRLSALPKTPSSMGIRRSVS

SEQ ID NO: 2320 - protein, 512 aa, unidentified
  REGION 1..512: note = Category: MG81 effectors
  REGION 1..512: note = Description: MG81-600 effector
  source 1..512: note = uncultivated organism sequence
MKKSNTDTCCLTLPLKLEKWQEDRLAKRFEIARQLYNTLVHAELKRLAQVKQTAEYRENERKIRALDWNDPGDQAKLKGLYKERRKSLKTAGFTDYSFTTDMGKYYKHFRDNIGSSVAVHGIAPQVWAAFDKLLFKKGGKKVHYKKPGEVNSVQGYSRTGKSGGTEIMFRGPYIEWKGLKLPLKLSPDNAYETDMLQRRVKLVRLVRRPGKRRDRWYAQLVLEAKPAIKADPVTGKAVHPIGSGPVGLDIGPQTLAYSAAGAAGLVELADRVQNIEQEKRCLQRKMDRSRRAANPDNYAEDGTIRRGVKLTHNKSKRYRRSQQELKYLQHRQAEIRKLQHIQLANHLLSLGDHFYVEKMEWSSLTHRAKKTVISEKTGKPRSKKRFGKSIANKAPAMLIEILRQKCKSLGLPNVVEINPADIKASQYNHLTGEYVKKSLSRRWNEMQDGEHLQRDLYSAFLLQHYDSMSKALDLDSLARDYPAFVQYHHREIERLHALPKTPSSMGIRRSIA

SEQ ID NO: 2321 - protein, 528 aa, unidentified
  REGION 1..528: note = Category: MG81 effectors
  REGION 1..528: note = Description: MG81-601 effector
  source 1..528: note = uncultivated organism sequence
MRRKNVYNNSNMERRDSCGKSSTDTCCLTLPLKLEKWQEDRLAKRFEIARQIYNTMVRAELKKLERVKQLPEYRKNQKEIQALDGKNSADRARLKELRANQNRILQKQGFTKYGFKSDSKDYYKHFIENIGSSVATHGIAPQVWNAFDKMLFQKDGKVVHFKRHGDVHSLKGGSVTHKSGGAEIMFRKTYIEWKGLKLPLKPSPNNAYEAEMLSYRVKYVRILRTRGKTKDRWYAQLSLEGKPAVKFDSSTGKLVHPVGRGAVGLDIGPQTLAYAAADEANLVELADQVQNIEQEKRRLQRKLDRSRRATNPDNYNENGTIRRGVKLTHNKSKRYCKLQKELSWIQHCQAETRKRQHIALANHLLSLGDCFYVEPMAWPSLTHRSKKTEFSEKTGKIKRKKRFGKSVANKAPASLIGILKLKCISLGLTGVVEVPMLLRASQYNHQSKDYEKKSLSQRWNDMPDGNRIQRDLYSAFLLQHYNSQSESFDQETLERDYPQFVRLHNQTIQRLSALPKTPSSMGIRRSVS

SEQ ID NO: 2322 - protein, 379 aa, unidentified
  REGION 1..379: note = Category: MG81 effectors
  REGION 1..379: note = Description: MG81-602 effector
  source 1..379: note = uncultivated organism sequence
MLFHKEGKKVHYKKKDDIHSLRGYSVTGKSGGVEIIFRETYIEWKGLKLPLKRSPDNAYETEMLSRRVKYVRLLRKPGKRKDRWYAQLSLEGKPAIKRDPESGELRHAIGRGAVGLDIGPQTLAYSACGAADLVELADQVQNIEQMKRRLQRKLDRSRRATNPNNYADNGTIRRGVKLTHNKSNRYRRTQRELRYLQHRQAEIRKRQHIELANRLLALGNCFYVEDMAWPSLTHRAKETAISEKTGRIKRKKRFGKSVANKAPATLIGILEQKCNSLGLPGVMKVPTSLRASQYNHQSGEYTSKPLSQRWNDMPDGERIQRDLYSAFLLQHYDPQAGNFNSALLQQDYPQFVQYHHRAIQRLSTAPKTLSSMGIQRSLR

SEQ ID NO: 2323 - protein, 512 aa, unidentified
  REGION 1..512: note = Category: MG81 effectors
  REGION 1..512: note = Description: MG81-603 effector
  source 1..512: note = uncultivated organism sequence
MPTKQKEGGNRCVLTLPLLTEPWQEHIIEKRFKIIEHLKNQLISIELRKLKNLQRTKAYKNLIKQIESVPKSERTVLYKERNKMLKDAGFSQYTFMDDMAGKKSLMQKHFESHINVQIAHKAAIDVWSSFEKFLFGTGQIVHYQKRGTLSSVASKSPKTGMFYYSDENIFKWSGGGTKPKGGIILCLRVASVKTNYEKEMVANNEIKYYRVVRKWMKTKYKYYLQITFAGKPADKHREISTGRVGIDIGTQTIAIASDKSVKLLELADKVNKNNIKKCELQRKLDRSRRYTNPDNFNPDGTVKRGTKGHKLKWNKSKHYIEIAGKIRELERKNADIRKYQHTCLANDILAMGNQIYIEPMNYKGLQKRAKETQVDEKGRYKKKKRFGKSLANKAPAMFVTILKTKAEQHGGEVYEVDIMLYRASQCDHTTGEYTKHGLNDRWRILGNGDKVQRDLYSAFLIKNSNKTHDEIDLDKCSKTYDNFKKLHDKEIENIRNEVKLRERKNISSYGIA

SEQ ID NO: 2324 - protein, 480 aa, unidentified
  REGION 1..480: note = Category: MG81 effectors
  REGION 1..480: note = Description: MG81-604 effector
  source 1..480: note = uncultivated organism sequence
MAGKSDKACCVLTLPLLTEPWQEHIIEKRFRIMEHLKNSLIALELRKLKNIQRTKQYRQLEAEISNAPKENRKTLYKKRNELLKNAGFSEFAFIDDMTNMQKHFVEHIATQIAHKSASDVWSSFEKVLFNTGRKIHFIRRGSLSSIACKKDGNGMRFRNGMLHWNGGQCKNKVKLELRVACPKTPYECAMLEKKIKYERIIRKWVKTRYKYYVQFTLDGNAVPKPRKMGTGRVGIDIGPSSIAIASSQEVRLMELADKSFSDQTTNPDNFNENKTIRRGVKLSWHYSKHYQKLRGQVRELERKNADIRKYQHTCLANYILSLGTEVYIEQMNFKGLQARAKETTYNKNGRANRKKRFGKSIANRAPAMLVTILETKLKSYAGTELHKVNTWSYRASQYDHITDTYTKKLLRQRWAELGNGDRIQRDLYSAFLLMNSQPSLQSTDRERCSKTYSQFKSLHDQEIYRLQQTPERHLSSFGIA

SEQ ID NO: 2325 - protein, 550 aa, unidentified
  REGION 1..550: note = Category: MG81 effectors
  REGION 1..550: note = Description: MG81-605 effector
  source 1..550: note = uncultivated organism sequence
MGWKSKGRGGTLVDNEEKKEDGATCCLTLPLKLEKWQSDHLEKRFEIARQLYNTLVHAELKKKCQVERMPEYQEIMKMIDAASNQKEKWALEKKRKAFLEENGFSRNAFKADMEKYYKHFNDNIGANVALHGITAQVWIAFDKVFVDNYKQKGKVHFKKPGELCSVQGYSQKKSGGKEIMFREDRIIWNQQGNRDRKKVKREFLLKLSPDNPYEAEMLKRHVKFVRILRKDGKTKPHWYAQLVLEGKPAVKRDPASGAPKHPIGHGVVGIDIGTRTLAYSTDKEVNLLELADRVQNIEQEKRRLQRKMDRSRRATNPENYNPDGTFKRGVKLTRNKSKRYKRIQHQYAMIQHHQADIRKQQHNELANYLLTLGDCFFVENMSYCDLVHRANKTEISEKTGRYKRKKRFGKSIANKAPAMLITMLKQKCQSRGLEGVKEVDTHVRASQYNHQTDTCIEKALENRWNVMPDGERIQRDLYSAFLLQHCKQGLPEYNRKELKKEFGEELYRVFDREALQRDYPQFVAYHHMTIQRLSELPHTIPSMGIRRIIS

SEQ ID NO: 2326 - protein, 512 aa, unidentified
  REGION 1..512: note = Category: MG81 effectors
  REGION 1..512: note = Description: MG81-606 effector
  source 1..512: note = uncultivated organism sequence
MPAKQKEGGNRCVLTLPLLTEPWQEHIIEKRFKIIEHLKNQLISIELRKLKNLQRTKAYKNLIKQIESVPKSERTALYKERNKMLKDAGFSQYTFMDDMAGKKSLMQKHFESHINVQIAHKAAIDVWSSFEKFLFGTGQIVHYQKRGTLSSVASKSPKTGMFYYSDENIFKWSGGGTKPKGGIILCLRVAPVKTNYEKEMVANNETKYYRVVRKWMKTKYKYYLQITFAGKPADKHREISTGRVGIDIGTQTIAIASDKSVKLLELADKVNKNHIKKCELQRKLDRSRRYTNPDNFNPDGTVKRGTKGHKLKWNKSKHYIEIAGKIRELERKNADIRKYQHTCLANDILAMGNQIYIEPMNYKGLQKRAKETQVDEKGRYKKKKRFGKSLANKAPAMFVTILKTKVEQHGGEVYEVDIMSYRASKCDHTTGEYTKHGLNDRWRILGNGDKVQRDLYSAFLIKNSNKTHDEIDLDKCSKTYDNFKKLHDKEIENIRNEVKLRERKNISSYGIA

SEQ ID NO: 2327 - protein, 512 aa, unidentified
  REGION 1..512: note = Category: MG81 effectors
  REGION 1..512: note = Description: MG81-607 effector
  source 1..512: note = uncultivated organism sequence
MKKSSTDTCCLTLPLKLEKWQEDRLAKRFEIARQLYNTLVHAELKRLAQVKQTAEYRENERKIRTLDWNDPGDQAKLKGLYKERRKSLKTAGFTDYSFTTDMGKYYKHFRDNIGSSVAVHGIAPQVWAAFDKLLFKKGGKKVHYKKPGEVNSVQGYSRTGKSGGTEIMFRGPYIEWKGLKLPLKLSPDNAYETDMLQRRVKLVRLVRRPGKRRDRWYAQLVLEGKPAIKADPVTGKAVHPIGSGPVGLDIGPQTLAYSAAGAAGLVELADRVQNIEQEKRCLQRKMGRSRRATNPDNYAEDGTIRRGVKLTHNKSKRYRRSQQELKYLQRRQAEIRKLQHIQLANHLLSLGDHFYVEKMEWSSLTHRAKKTVISEKTGKPRSKKRFGKSIANKAPAMLIEILRQKCKSLGLPNVVEINPADIKASQYNHLTGEYVKKSLSRRWNEMQDGEHLQRDLYSAFLLQHYDSMSKALDLDSLARDYPAFVQYHHQEIERLHALPKTPSSMGIRRSIA

SEQ ID NO: 2328 - protein, 525 aa, unidentified
  REGION 1..525: note = Category: MG81 effectors
  REGION 1..525: note = Description: MG81-608 effector
  source 1..525: note = uncultivated organism sequence
MAKNNNNTDTCVLTLPLRVEKWQEDCLLKRFEAARRIYNSLLNFELKKLRQLERTVEYRQIQSVISSAYRSNTKDSPECKDAFKRREKLISANGISEYGFKSDVKFFYKHFDGLIGSNVAVHCIAVQLWAAFDKYLRGSGKEIHFKRLGDISSLKGYSVKGKSGGCEIIFRGQYIEWTRKKKKLLLPLKIDPDNEYEREMLSRRVKYVRIIKKPGKNRLRWYAQLTLEGKPALKYSAETGKPIHSVGKGNVGIDIGPQTVAYASDKEVALLELADRVTNIEHQKKKLQRKLDRSRRATNPDNYKPDGTIKRGVKLTRNKSKRYLKLQSKLAYIQHRQAEIRKLQHTCLANHMLTLGDRFFVEKMNWPGLAHRAKETSISEKTGRYKRKKRFGKSLANKAPAMFISILKRKCETLGLPGVVEVDTYSLKASQYNHLSDTYEKKSLSERWNYMPISDGSDSSKTKRIQRDLYSAFLLQHTIPQPCSFDKKALRIDYPNFVTMHDAEIHRLESLPKTITSMGVRRSHS

SEQ ID NO: 2329 - protein, 485 aa, unidentified
  REGION 1..485: note = Category: MG81 effectors
  REGION 1..485: note = Description: MG81-609 effector
  source 1..485: note = uncultivated organism sequence
MKRFEIARQIYNSLLHAEQKKLRRLEQTPEYREIQRKLQELYREKAEKSRAFREIAKKRTALLKRAGFTEYAFKTDMKAYYKHFKENIGSSVAVHGIASQVWTAFDRKLYGNGKHVHFKRPGEIRSLRGYSAAGKSGGVEILFRGTHIEWKGLCLPLKQKPENAYETEMLSRRVKYVRILRTPGKHRDRWYAQLVLEGRPAVKRNTETGELLHPIGKGPVGIDIGPQTVAYVSQGEASLLELADRVRNIEQEKRKLQRKMDRSRRATNPENYAEDGTIRRGIRLTRNKSGRYRKLQKELAFLQHHQADIRKQQHIALANHLLSLGDRFYVEDMAWPSLTHRAKETVISPKTGRYQRKKRFGKSVANKAPAMFLGILTQKCVSLGLPGVVKVSTSVRASQYNHLTETYQKKPLSQRWNVMPDGRKIQRDLYSAFLLQHMTPQLDGFDPDGLRQDYESFAVLHEEAIHKLRLVPRTLTSMGLQRKCS

SEQ ID NO: 2330 - protein, 531 aa, unidentified
  REGION 1..531: note = Category: MG81 effectors
  REGION 1..531: note = Description: MG81-610 effector
  source 1..531: note = uncultivated organism sequence
MILLAKNNNNNNNTDTCVLTLPLRVEKWQEDCLLKRFEAARRIYNSLLNFELKKLRQLERTVEYRQIQSVISSAYRSNTKDSPECKDAFKRREKLISVNGISENGFKSDVKFFYKHFDGLIGSNVAVHCIAVQLWAAFDKYLSGSGKEIHFKRLGDISSLKGYSVKGKSGGCEIIFRGQYVEWTRKKKKLLLPLKIDPDNEYEREMLSRRVKYVRIIKKPGKNRLRWYAQLTLEGKPALKYSAGTGKPIHSVGKGNVGIDIGPQTVAYASDKEVALLELADRVTNIEHQKKKLQRKLDRSRRATNPDNYKPDGTIKRGVKLTRNKSKRYLKLQSKLAYIQHRQAEIRKLQHTCLANHMLTLGDRFFVEKMNWPGLAHRAKETSISEKTGRYKRKKRFGKSLANKAPAMFISILKRKCETLGLPGVVEVDTYSLRASQYNHLSDTYEKKSLSERWNYMPISDGSDSSKTKRIQRDLYSAFLLQHTIPQPCSFDKKALRIDYPNFVTMHDAEIHRLESLPKTITSMGVRRSHS

SEQ ID NO: 2331 - protein, 512 aa, unidentified
  REGION 1..512: note = Category: MG81 effectors
  REGION 1..512: note = Description: MG81-611 effector
  source 1..512: note = uncultivated organism sequence
MKKSSTDTCCLTLPLKLEKWQEDRLAKRFEIARQLYNTLVHAELKRLAQVKQTAEYRENERKIRALDWNDPGDQTKLKGLYKERRKSLKTAGFTDYSFTTDMGKYYKHFRDNIGSSVAVHGIAPQVWAAFDKLLFKKGGKKVHYKKPGEVNSVQGYSRTGKSGGTEIMFRGPYIEWKGLKLPLKLSPDNAYETDMLQRRVKLVRLVRRPGKRRERWYAQLVLEGKPAIKADPVTGKAVHPIGSGPVGLDIGPQTLAYSAAGVAGLVELADRVQNIEQEKRCLQRKMGRSRRATNPDNYAEDGTIRRGVKLTHNKSKRYRRSQQELKYLQHRQAEIRKLQHIQLANHLLSLGDHFYVEKMEWSSLTHRAKKTVISEKTGKPRSKKRFGKSIANKAPAMLIEILRQKCKSLGLPNVVEINPADIKASQYNHLTGEYVKKSLSRRWNEMQDGEHLQRDLYSAFLLQHYDSMSKALDLDSLARDYPAFVQYHHREIERLHALLKTPASMGIRRSIA

SEQ ID NO: 2332 - protein, 511 aa, unidentified
  REGION 1..511: note = Category: MG81 effectors
  REGION 1..511: note = Description: MG81-612 effector
  source 1..511: note = uncultivated organism sequence
MGKSSTDTCCLTLPLKLEKWQEDRLAKRFEIARQIYNTMVRAELKKLDRVKQLPEYRKNQKEIQALDWKNSADKQRLKELYGNQRKILQKQGFTEYGFKSDSKDYYKHFIENIGSSVATHGIAPQVWNAFDKMLFQKDGKVVHFKRYGDVHSLKGGSVTNKSGGAEIMFRKTYIEWKGLKLPLKLSPNNAYEAEMLSYRVKYVRILRTRGKTKDRWYAQLSLEGKPAVKYDSSTGKPVHPVGRGAVGLDIGPQTLAYAAANEANLVELADQVQNIEQEKRRLQRKLDRSRRATNPDNYNENGTIRRGVKLTHNKSKRYCKLQKELSWIQHCQAETRKRQHIALANHLLSLGDCFYVEPMAWPSLTHRAKKTEVSEETGRIKRKKRFGKSVANKAPASLIGILKLKCISLGLTGVVEVPMLLRASQYNHQSKDYAKKSLSQRWNDMPDGNRIQRDLYSAFLLQHYDSQSESFDQETLERDYPQFVRLHNQTIQRLSALPKTPSSMGIRRSVS

SEQ ID NO: 2333 - protein, 512 aa, unidentified
  REGION 1..512: note = Category: MG81 effectors
  REGION 1..512: note = Description: MG81-613 effector
  source 1..512: note = uncultivated organism sequence
MPTKQKEDSNRCVLTLPLLTEPWQEHIIEKRFKIIEHLKNQLISIELRKLKNLQRTKAYKNLIKQIESVPKSERTALYKERNKMLKDTGFSQYTFMDDMAGKKSLMQKHFESHINVQIAHKAAIDVWSSFEKFLFGTGQIVHYQKRGTLSSVASKSPKTGMFYYSDENIFKWSGGGTKPKGGIILCLRVASVKTNYEKEMVANNEIKYYRVVRKWMKTKYKYYLQITFAGKPADKHREISTGRVGIDIGTQTIAIASDKSVKLLELADKVNKNHIKKCELQRKLDRSRRYTNPDNFNPDGTVKRGTKGHKLKWNKSKHYIEIAGKIRELERKNADIRKYQHTCLANDILAMGNQIYIEPMNYKGLQKKAKETQVDEKGRYKKKKRFGKSLANKAPAMFVTILKTKAEQHGGEVYEVDIMSYRASQCDHTTGEYTKHGLNDRWRILGNGDKVQRDLYSAFLIKNSNKTHDEIDLDKCSKTYDNFKKLHDKEIENIRNEVILRKRRNISSYGIA

SEQ ID NO: 2334 - protein, 528 aa, unidentified
  REGION 1..528: note = Category: MG81 effectors
  REGION 1..528: note = Description: MG81-614 effector
  source 1..528: note = uncultivated organism sequence
MILLANNNNNTDTCVLTLPLRVEKWQEDCLLKRFEAARRIYNSLLNFELKKLRQLERTVEYRQIQSVISSAYRSNTKDSPECKAALKRREKLIDENGLTKNGFKNDVKFFYKHFDGLIGSSVAVHCIAVQLWAAFNKYLCGNGKEIHFKRLGDISSLKGYSVKGKSGGCEIIFRGQYVEWTRKKKKLLLPLKIDPDNEYEREMLSRRVKYVRIIKKPGKNRLRWYAQLTLEGKPALKYSAETGKPIHSVGKGDVGIDIGPQTVAYASDKEVALLELADRVTNIEHQKKKLQRKLDRSRRATNPDNYKPDGTIKRGVKLTRNKSKRYLKLQSKLAYIQHRQAEIRKLQHTCLANHMLTLGDRFFVEKMNWPGLAHRAKETSISEKTGRYKRKKRFGKSLANKAPAMFISILKQKCETLGLPGVVEVDTFRLKASQYNHLSDTCEKKSLSERWNYMPISDGSDSSKTKRIQRDLYSAFLLQHTIPQSCSFDKEALRIDYPNFVTMHDAEIHRLESLPKTITSMGVRRSHS

SEQ ID NO: 2335 - protein, 528 aa, unidentified
  REGION 1..528: note = Category: MG81 effectors
  REGION 1..528: note = Description: MG81-615 effector
  source 1..528: note = uncultivated organism sequence
MAKNNNNNNDTDTCVLTLPLRVEKWQEDCLLKRFEAARRIYNSLLNFELKKLRQLERTVEYRQIQSVISSAYRSNTKDSLECKDAFKHREKLISANGISKNGFKSDVKFFYKHFDGLIGSSVAVHCIAVQLWAAFDKYLSGSGKEIHFKRLGDISSLKGYSVKGKSGGREIIFRGQYIEWTRKKKKLLLPLKIDPDNEYEREMLSRRVKYVRIIKKPGKNRLRWYAQLTLEGKPALKYSAGTGKPIHSVGKGDVGIDIGPQTVAYASDKEVALLELADRVTNIEHQKKKLQRKLDRSRRATNPDNYKPDGTIKRGVKLTRNKSKRYLKLQSKLAYIQHRQAEIRKLQHTCLANHMLTLGDRFFVEKMNWPGLAHRAKETSISEKTGRYKRKKRFGKSLANKAPAMFISILKRKCETLGLPGVVEVDTYSLKASQYNHLSDTYEKKSLSERWNYMPISDGSDSSKTKRIQRDLYSAFLLQHTIPQPCSFDKEALRIDYPNFVTMHDAEIHRLESLPKTITSMGVRRSHS

SEQ ID NO: 2336 - protein, 534 aa, unidentified
  REGION 1..534: note = Category: MG81 effectors
  REGION 1..534: note = Description: MG81-616 effector
  source 1..534: note = uncultivated organism sequence
MILLANNNNNNNNNNNTDTCVLTLPLRVEKWQEDCLLKRFEAARRIYNSLLNFELKKLRQLERTVEYRQIQSVISSAYRSNTKDSPECKDAFKRREKLISANGISEYGFKSDVKFFYKHFDGLIGSSVAVHCIAVQLWAAFDKYLRGSGKEIHFKRLGEISSLKGYSVKGKSGGLEIIFRGQYIEWTRKKKKLLLPLKIDPDNEYEREMLSRRVKYVRIIKKPGKNRLRWYAQLTLEGKPALKYSAETGKPIHSVGKGNVGIDIGPQTVAYASDKEVALLELADRVTNIEHQKKKLQRKLDRSRRATNPDNYKPDGTIKRGVKLTRNKSKRYLKLQSKLAYIQHRQAEIRKLQHTCLANHMLTLGDRFFVEKMNWPGLAHRAKETSISEKTGRYKRKKRFGKSLANKAPAMFISILKRKCETLGLPGVVEVDTYNLKASQYNHLSDTYEKKSLSERWNYMPISDGSDSSKTKRIQRDLYSAFLLQHTIPQPCSFDKEALRIDYPNFVTMHDAEIHRLESLPKTVTSMGVRRSHS

SEQ ID NO: 2337 - protein, 542 aa, unidentified
  REGION 1..542: note = Category: MG81 effectors
  REGION 1..542: note = Description: MG81-617 effector
  source 1..542: note = uncultivated organism sequence
MPKRAEGPRCVLTMPLLTEPWQEHILETRFRIILHLKNQLVRMEWRKYKDLCRTKEFRQLEEQIEATPKEERRPLHKKRRELLKAAGLSEYRFKADISDMQKQFSRHIAVKIAENAASDVWRAFDTYLFKKGQEVHTHSLSMMRSVAGQAGNGMHYIKVTKKGKDYYFFKWNVEKEKEEPTDQKKRPSKKQTRRERIRGKKSIPLKISITPPRNAYEREMLEKPVKYLRVVRRWIKSRYKYYLQFTLEGHPVPKPKERGTGRVGIDIGTRTIAVVSGNEVHLEELVEVTDRDHRRSVDQCQRRKAALRRKMDRSSRIMNPQNFKPDGSVKPRKELTPWKRSNRYKRLAGKVRELERKNADVRKYEHSRLADRILAMGDEIFLESMNFSALQRRKKKTEKDKKGRYAKKKRFGKSIAHRAPATLVSTLERKAAQRHQTVVRVKTETFRASQLDHTTGEYRKTHLSERRKTLSNGDEVQRDLYAAFLLMNSASTWDEKKKEEVWDHSDLDACRESYGTFKVLHDAEILRIANDGRQHPSSFGIA

SEQ ID NO: 2338 - protein, 511 aa, unidentified
  REGION 1..511: note = Category: MG81 effectors
  REGION 1..511: note = Description: MG81-618 effector
  source 1..511: note = uncultivated organism sequence
MAKCSTDTCCLTLPLRLEKWQEDRLAKRFEIARQIYNTMVRAELKKLRAMEQSEPYKANQEKIQALDWKTQTDKQALKALYKERDKLLRDGGFSEYGFKSDIKNYYKHFNNNIGSNVAFHGIAPQVWAAFEKMLFKKEGKKVHFKKKGDIHSLRGYSAAGKSGGVEIIFRETYIEWKGLKLPLKLSPDNIYETQMLSYRVKYVRLLRKPGKRKDRWYAQLSLEGKPVIKYNPKTGEVRHPIGKGAVGLDIGPQTLAYSAATGADLVELANQVQNVEQEKRRLQRKLDRSRRATNPGNYADDGTIRRGIALTHNKSKRYLRTQQELKYLQHQQAEIRKRQHTELANHLLSLGDCFYVEKMVWTSLTHRAKETEISEKTGKIKRKKRFGKAVANKAPATLIGILQRKSAALGIPGVIEVPTSVKASQYNHQSGTYTPKPLSQRWNNMPDGERIQRDLYSAFLLQHYDPQTNTFDANSLHQDYPQFVQYHHDAVLRLYAMPKTPSSMGIKRSLR

SEQ ID NO: 2339 - protein, 538 aa, unidentified
  REGION 1..538: note = Category: MG81 effectors
  REGION 1..538: note = Description: MG81-619 effector
  source 1..538: note = uncultivated organism sequence
MDNEEKKEDGATCCLTLPLKLEKWQSDHLEKRFEIARQLYNTLVHAELKKKCQVERMPEYQEIMKMIDAASNQKEKWALEKKRKAFLEENGFSRNAFKADMEKYYKHFNDNIGANVALHGITAQVWIAFDKVFVDNYKQKGKVHFKKPGELCSVQGYSQKKSGGKEIMFREDRIIWNQQGNRDRKKVKREFLLKLSPDNPYEAEMLKRHVKFVRILRKDGKTKPHWYAQLVLEGKPAVKRDPASGAPKHPIGHGVVGIDIGTRTLAYSTDKEVNLLELADRVQNIEQEKRRLQRKMDRSRRAMNPENYNSDGTFKRGVKLTRNKSKRYRRIQHQLAMIQHHQADIRKQQHNELANYLLTLGDCFFVENMSYCDLVHRANKTEISEKTGRYKRKKRFGKSIANKAPAMLITMLKQKCQSRGLEGVKEVDTHVRASQYNHQTDTCIEKALENRWNVMPDGERIQRDLYSAFLLQHCKQGLPEYNRKELKKEFGEELYRVFDREALQRDYPQFVAYHHMTIQRLSELPHTIASMGIRRSIS

SEQ ID NO: 2340 - protein, 512 aa, unidentified
  REGION 1..512: note = Category: MG81 effectors
  REGION 1..512: note = Description: MG81-620 effector
  source 1..512: note = uncultivated organism sequence
MKKSSTDTCCLTLPLKLEKWQEDRLAKRFEIARQLYNTLVHAELKRLAQVKQTAEYRENERKIRALDWNDPGDQTKLKGLYKERRKSLKTAGFTDYSFTTDMGKYYKHFRDNIGSSVAVHGIAPQVWAAFDKLLFKKGGKKVHYKKPGEVNSVQGYSRTGKSGGTEIMFRGPYIEWKGLKLPLKLSPDNAYETDMLQRRVKLVRLVRRPGKRRDRWYAQLVLEGKPAIKADPVTGKAVHPIGSGPVGLDIGPQTLAYSAAGAAGLVELADRVQNIEQEKHCLQRKMDRSRRATNPDNYAEDGTIRRGVKLTHNKSKRYRRSQQELKYLQRRQAEIRKLQHIQLANHLLSLGDHFYVEKMEWSSLTHRAKKTVISEKTGKPRSKKRFGKSIANKAPAMLIEILRQKCKSLGLPNVVEINPADIKASQYNHLTGEYVKKSLSRRWNEMQDGEHLQRDLYSAFLLQHYDSMSKALDLDSLARDYPAFVQYHHREIERLHALPKTPASMGIRRSIA

SEQ ID NO: 2341 - protein, 523 aa, unidentified
  REGION 1..523: note = Category: MG81 effectors
  REGION 1..523: note = Description: MG81-621 effector
  source 1..523: note = uncultivated organism sequence
MILLAKNNNNNTDTCVLTLPLRVEKWQEDCLLKRFEAARRIYNSLLNFELKKLRQLERTVEYRQIQSVISSAYRSNTKDSPECKDAFKRREKLIDENGLTKNGFKNDVKFFYKHFDGLIGSSVAVHCIAVQLWAAFNKYLCGNGKEIHFKRLGDISSLKGYSVKGKSGGCEIIFRGQYVEWTRKKKKLLLPLKIDPDNEYEREMLSRRVKKPGKNRLRWYAQLTLEGKPALKYSAETGKPIHSVGKGDVGIDIGPQTVAYASDKEVALLELADRVTNIEHQKKKLQRKLDRSRRATNPDNYKPDGTIKRGVKLTRNKSKRYLKLQSKLAYIQHRQAEIRKLQHTCLANHMLTLGDRFFVEKMNWPGLAHRAKETSISEKTGRYKRKKRFGKSLANKAPAMFISILKRKCETLGLPGVVEVDTYSLKASQYNHLSDTCEKKSLSERWNYMPISDGSDSSKTKRIQRDLYSAFLLQHTIPQPCSFDKEALRIDYPNFVIMHDAEIHRLESLPKTITSMGVRRSHS

SEQ ID NO: 2342 - protein, 510 aa, unidentified
  REGION 1..510: note = Category: MG81 effectors
  REGION 1..510: note = Description: MG81-622 effector
  source 1..510: note = uncultivated organism sequence
MAKATTDTCCLTLPLVLEKWQSDRLAKRFELARQIYNTLLNYELKKLRRLEKTEEYAAGQAKLKELNDRQERDEAARKECHRQLNELRKAAGFSEYDFKTDVKPFYKHFGDNVGSSVAVHGIASQVWQAFERLFYGNGKAVHFKKRGEIRSLRGYSVSGKSGGVEIMFRGSYIEWKGLRLPIKLDADNAYEAEMLQKRVKYCRIVRKEGRRKTRWYVQLMLEGKPALKCDPDTGALRHPTGSGPVGIDIGPQTVAYAAETEAVLQELADGVKDIEREKRTVQRKLDRSRRATNPECFAADGTIKRGVKLNWRKSKRYLALQRELASLQRQQAEIRKRQHTELANHLLSLGDRFYVEDMAWPALTHRAKETAISEKTGRYKRKKRFGKSVGNKAPAMLIGILDQKLRSRGMGGVVKVPTTVRASQFNHVTGEYQKKPLSQRWNEMPDGRRIQRDLYSAFLLQHVNEAQDGFDVAALIRDYENFVTLHDRMIETLKTAPKTLTSMGIWRTAS

SEQ ID NO: 2343 - protein, 495 aa, unidentified
  REGION 1..495: note = Category: MG81 effectors
  REGION 1..495: note = Description: MG81-623 effector
  source 1..495: note = uncultivated organism sequence
MPNTDSNRCILTLPLMTEPWQEHLIETRFDIMEHLKNSLIALELRKLKNLQRTRAYKELEKKIFEKPKEERKPLYKERSAMLRTAGFSEFDFINDMTPMQKHFADHIAAQISHRSASDVWRAFESYLFSSGREVHFQKRGTLDSVACKKAGNGMNYRNDTFEWSGGRTPNAKRLCIRVEKPQTEYEKHMLEKEVKNMRIIRKWMKTRYKYYLQLTLVGDPYQKPRKIGEGRVGIDIGTRTIAIASETTVRLLELADRIDGNHKRKCELQRKMDASKRATNPDNFNSDGTIRRRSKGKKMTWHFSKHYLRMRDQVRELERKNADIRTYQHNCLANEVLTLGTDVFVEPMSYKGLQHRAKETKVDEKGRYLKKKRFGKSLANKAPSKFLMILENKLACKGKALNYVDINRFRASQFDHTNGTYRKKQLSERFATLSTGEHVQRDMYSAFLLMNSNDSLNAPDIERCGQTFERFKELHAIEVERIRQSPYRRIQSFGI

SEQ ID NO: 2344 - protein, 522 aa, unidentified
  REGION 1..522: note = Category: MG81 effectors
  REGION 1..522: note = Description: MG81-624 effector
  source 1..522: note = uncultivated organism sequence
MKKSSTDTCCLTLPLKLEKWQSDRLEKRFEIGRQIYNTVVRAELKKLHQVERTPQYREIEQKLKEAKQEEAKELWKKRTQLLSKSGFSEYGFKSDMKYYYQHFKENIGSSVAVHGIASQVWTAFEKVLFSKDGKMVHFKKKGELSSLRGYSQAGKSGGIEIIFRGSYVEWKGLKLPLKLSSNNDYETEMLSKRVKYVRILRKEGKTKPHWYAQLVLEGKPAIKRDPASGAPKHPVGHGVVGIDIGTRTLAYSADSKVDLIELADRVQNIELEKMLLQRKLDRSRRATNPENYKPDGTIKKGVKLTRNKSKRYRKIQHQLAMLQHRQADIRKRQHNELANYLLTLGDCFFVEDMDYRALTRKAKKTEISEKTGRYKRKKRFGKSVANKAPSMLIALLDQKCKSLNLEGVKKVDTAVKASQYNHQTDECKAKELKERWNIMPDGERIQRDLYSAFLLQHCKRGLPEYNRKKLQEAFGNELYRVFDREALQRDYPKFVEYHRETIQRLSALPKTIPSMGIRRIIS

SEQ ID NO: 2345 - protein, 496 aa, unidentified
  REGION 1..496: note = Category: MG81 effectors
  REGION 1..496: note = Description: MG81-625 effector
  source 1..496: note = uncultivated organism sequence
MAKNEQNCCVLTLPLLTEPWQEHIIETRFRIMEQLKNALIAKELGKLNNLKRTREWKRLMKSIQDAKDEKEKKQLFKKRTELLRNVGFSDFSFSNDVTNLKIHKHFAEHINSGIAQRAGKDVWRAFEKYLFSDGKTVHFHRRGTLDSVANRYAREGMMIDGDILTWKGGQSDHQIVLKIRIRRLKNAYEREMLQKTVRNLRIVRKWMKTRYKYYLQITLQGDPASKYRSVGKGRIGIDIGTQTIAWSSPTEVRLAELAAGIKRNHAEKTALQRKMDRSRRTANPQNYNPDGTIRRGVKLRWVKTKHYLRMEGRVRELERKNADIRKYEHICMANHILSLGNEVYIEDMSFKGLQGRAKETKLDKNGRFARKKRFGKSLANRAPSMFVTILENKLKASGGSLHKVNTRTFRASQYDHTADEFKKKTLGQRWNHLKNGDKIQRDLYSAFLLMNAAPSLEEPDKKLCGKTYPQFNRLHDAEMERLRAEEKPHLSSMGIH

SEQ ID NO: 2346 - protein, 540 aa, unidentified
  REGION 1..540: note = Category: MG81 effectors
  REGION 1..540: note = Description: MG81-626 effector
  source 1..540: note = uncultivated organism sequence
MATTDKKDEENLRAYKFRLDPNQAQTTALYQAVGAARYTYNMLTAYNLEVNRLRDDYWKRRHDEGISDADIKKELNALAKEDKRYKQLNYGAFGTQYLTPEKKRHEQAEHRIENGEDPSVVWNQETERSANPWLHTANQRVLVSGLQNASDAWDNFWASRTGKRAGRLVGTPRFKKKGISRDSFTVPAPEKMGAYGTAYLRGEPAYKQGRRKITDYRHVRLSYLGTIRTFNSTKPLVKAVAAGAKIRRYTVSRNADRWYVSFLVKFSEPIRRSATKRARAAGSVGVDLGVKYLASLSDSEAPQRFPNLKFVEGLPSLENPRWSEASSRRLHKLQRALARSQKGSNRRSRLVKQIARLHHMTALRRESNLHQLTKKLATEYTLVGFEDLNVSGMTASAKGTVENPGKNVAQKSGLNRVVLDAAFGVFRNQLEYKAVWYGSAFEKVDRYFASSQTCSECGRKAKTKLTLRDRVFDCAYCGNMMDRDLNAAVNICREAQRLFDEKLASEDGESLNGRGSRGALRGAETVEASRPPASHRRGSP

SEQ ID NO: 2347 - protein, 509 aa, unidentified
  REGION 1..509: note = Category: MG81 effectors
  REGION 1..509: note = Description: MG81-627 effector
  source 1..509: note = uncultivated organism sequence
MARCTTPTCVLTLPLRLEKWQEDRLAKRFEIARKIYNTFLGVKLKELRRLEQTPEYRAIKKELAALYSEKEKNADRIRALYEERNALLKNFTEFKFKKDIKFYYKHFNSNIASKVATHCIASQVWSAFEKYLFGNGKRIHFKRPGEIYSLRGFSATNARSGGSEIIYRGDHIEWNKLRLPLKLDPGNQYEEEMLTNRVKYVRILRRPGKNRDHWYAQLTLEGLPSIKRDDETGDPVHPIGNGPVGIDIGPQTIAYSSAKEAGLLELADRVQNIEDKKCRIQRKMDRSRRATNPGNYNPDGTIKRGVPLTRNKSKRYLRLQKELAWIQHQQAAIRKEQHVALANYLLTLGDRFYIEDMNWQGLARRAKGTAVPEEEKPHKRKKRFGKSIANKAPAALVTILKNKCTSLGLPGVIPINTKVRASQYNHLTDSYQKKELSQRWNEMPDGRKIQRDLYSAFLLQHMNSQLDGFDRAALQRDYESFVSLHDQAILRAAAAPKLISSMGVKRTAN

SEQ ID NO: 2348 - protein, 530 aa, unidentified
  REGION 1..530: note = Category: MG81 effectors
  REGION 1..530: note = Description: MG81-628 effector
  source 1..530: note = uncultivated organism sequence
MILLAKNNNNNNTDTCVLTLPLRVEKWQEDCLLKRFEAARRIYNSLLNFELKKLRQLERTVEYRQIQSVISSAYRSNTKDSPECKDAFKRREKLISANGISENGFKSDVKFFYKHFDGLIGSNVAVHCIAVQLWAAFDKYLSGSGKEIHFKRLGDISSLKGYSVKGKSGGREIIFRGPYIEWTRKKKKLLLPLKIDPDNEYEREMLSRRVKYVRIIKKPGKNRLRWYAQLTLEGKPALKYSAETGKPIHSVGKGNVGIDIGPQTVAYASDKEVALLELADRVTNIEHQKKKLQRKLDRSRRATNPDNYKPDGTIKCGVKLTRNKSKRYLKLQSKLAYIQHRQAEIRKLQHTCLANHMLTLGDRFFVEKMNWPGLAHRAKETSISEKTGRYKRKKRFGKSLANKAPAMFISILKRKCETLGLPGVVEVDTFRLRASQYNHLSDTYEKKSLSERWNYMPISDGSDSSKTKRIQRDLYSAFLLQHTIPQPCSFDKEALRIDYPNFVIMHDAEIHRLESLPKTITSMGVRRSHS

SEQ ID NO: 2349 - protein, 1387 aa, unidentified
  REGION 1..1387: note = Category: MG81 effectors
  REGION 1..1387: note = Description: MG81-630 effector
  source 1..1387: note = uncultivated organism sequence
MKLTKVEKARIAVSREKKDSGRIILYTNPEDVKKTSVTTMEQQVSKRIDQANKLYQVFFKSVIPVELNKHFAEISKIAAKCRNTEEFYKKACGYSGYEWTDAKQKKRTSQISRFSYTSSGKNMYVVMDNFVKEYMVQIWQEKDFRNAAVKILCCICDGKKFASKLEKVKKESPDTLKKFIEISGKCEGNPFVDYDTSFLEKVFTLVISQMVKNCDRKSYEQDDKEKIKKSIQKEIQWLSHVQSVTERSFGREGKTYLLFKIRNPYATEERLQTVLIRMRKTLKRGRNRDIAIVLLQGLAQMNQVTFTDTVKHLYQEEEKAFCDFIDAVNRDYYRVNIVKSVRNMDVKVQPDLNDNSILKLSGLGNIKKEALSDTLLRYAASADESDQVLLDIKKLLFEYFLPENSKETSKYTTVQNLWNIPYLPKIFFDYGFENEDSDDDNECAEDIETLCDVEPQYKINQHSLKRRIRYVNYGKYLQMTKNESDRERRYWIHYIKEFVEKNYVDSGRTLSEKNCYASSMMLNCWKEIIRYLCGKYIDIGKAVFHFTNLTAMPKPKDKIIYGQLEEQYKKGISSFDYEAIKAEETLQRDIVQSVVAAAFAFSKSVIDETKMEECQETNKEDILFLSENVLGSLLKENTIKLILRFYGGESSVAQKEYFDQQEIVQEMISHLKSIRNENFHYLDGAKKDNPHKYASILWKNDEMAYQKLTKQRYYANNVGLFYRAEEIQELVQELYSQKNITEAQIPAFRTVLKRKDLPGYMEELGILFPDNTQEKSKGDFEGTLYFLMKEIYYRDFIVKDKAAAYFFKAVDQNKEQSKKEDKHTERAAENFHRYVKSLEKKYNKKEISFGTVCQYIMMEYNQQNTTKQETEIYKHFKMLISLCIRKAFGNYIKETYRFLFHPIYSKQQGEPEYLDTLELESGVKEKNYEWFTLAHFLHPVQLNHLVGDLKSYIQYREDILRRIVFAEQRVYADQQKEVQQKVKTAKEILEVLEFVRKVSGRVSNEYTDYYENEEEYAEFLYQYIDFRKREGKSAFESLKYFCQNILDSGTVVDLYADTENPKVLRNIELTRMYAGSNVKIPEYEKITEDEIKMYYQEKNSVALILSRGLCRNEKEQKKVIEFNWKKKRLTLNEITDVFSLVNDLLGKMISFSYLRERDQMYLLLGFYYMALCAENKSENHLGWKGETLDKLESSDSKFDIGGGLVLYQIVSAFNFGSKLLYISEDGRWKMAGGAFPGKYGRFENDYNHRTSLSKVIRLFENESYEREIIYWRDYVDHMKYYVNQNQSIMEIYSAFYSKVLGYSAKLRKSVVFNLQAALEKHHINPECIWMTSDGKCADIKLMKNLESQKFTYKLAKREGEKTERKICMNALNENFLKTIRTSLEYKK

SEQ ID NO: 2350 - protein, 505 aa, unidentified
  REGION 1..505: note = Category: MG81 effectors
  REGION 1..505: note = Description: MG81-631 effector
  source 1..505: note = uncultivated organism sequence
MARAQTDTCCLTLPLKLEKWQSDRLDKRLEIARQIYNTLLRFELKKLLRLEESKEYTDIQNSLKEITDNTERNKLYKQIDKLRQKAGFSEYAFKTDIKEFYKHFSDNIGSSVAVHGIAAQVWTAFDRLFYGNGKAVYYKRRGELNSVRGYSVAGKSGGIEIIFRGNYIEWKGLKLPIKLDLTNTYENEMLQRRVKYCRLLKKPGRTKERWYVQLMLEGKPAIKVDKNTGELRHPVGRGAVGIDIGPQTIAYVSDSEIDLKELADQVNNIEREKRVLQRKLDRSRRATNPDNYAPDGTIKRGVKLSHNKSKRYIKTQRELAALQRQQADIRKRQHNELANHLLSLGDCFYIEKMEWPALTHRAKQTEISEKTGKDKRKKRFGKSVGNKAPATLTGLLDQKLKSRGLSGIIEVDTKVRASQYNHLTDDYHKKELSERWNFMPDGRRIQRDLYSAFLLQHMNEQQDGFDKTALQRDYERFVIQHDQCIEELKRAPKTLASMGIVRRAS

SEQ ID NO: 2351 - protein, 521 aa, unidentified
  REGION 1..521: note = Category: MG81 effectors
  REGION 1..521: note = Description: MG81-632 effector
  source 1..521: note = uncultivated organism sequence
MMATWKGGIPVGKSSTDTCCLTLPLKLEKWQEDRLAKRFEIARQIYNTMVRAELKKMDRVKQLPEYRKNQKEIQALDWKNSADKQRLKELYGNQNRILQKQGFTKYGFKSDSKDYYKHFIENIGSSVATHCIAPQVWNAFDKMLFQKDGKVVHFKRYGDVHSLKGGSVTNKSGGAEIMFRKTYIEWKGLKLPLKLSPNNAYEAEMLSYRVKYVRILRTRGKTKDRWYAQLSLEGKPAVKYDSSTGKPVHPVGRGAVGLDIGPQTLAYAAANEANLVELADQVQNIEQEKRRLQRKLDRSRRATNPDNYNENGTIRRGVKLTHNKSKRYCKLQKELSWIQHCQAETRKRQHIALANHLLSLGDCFYVEPMAWPSLTHRAKNTEVSEKTGRIKRKKRFGKSVANKAPASLIGILKLKCISLGLTGVVEVPMLLKASQYNHQSKDYAPKSLSQRWNDMPDGNRIQRDLYSAFLLQHYNSQLENFNQETLERDYPQFVRLHNQTIQRLSALPKTPSSMGIRRSVS

SEQ ID NO: 2352 - protein, 530 aa, unidentified
  REGION 1..530: note = Category: MG81 effectors
  REGION 1..530: note = Description: MG81-633 effector
  source 1..530: note = uncultivated organism sequence
MILLAKNNNNNNTDTCVLTLPLRVEKWQEDCLLKRFEAARRIYNSLLNFELKKLRQLERTVEYRQIQSVISSAYRSNTKDSPECKDAFKRREKLISANGISKNGFKSDVKFFYKHFDGLIGSSVAVHCIAVQLWAAFDKYLSGSGKEIHFKRLGDISSLKGYSVKGKSGGCEIIFRGQYVEWTRKKKKLLLPLKIDPDNEYEREMLSRRVKYVRIIKKPGKNRLRWYAQLTLEGKPALKYSAETGKPIHSVGKGNVGIDIGPQTVAYASDKEVALLELADRVTNIEHQKKKLQRKLDRSRRATNPDNYKPDGTIKRGVKLTRNKSKRYLKLQSKLAYIQHRQAEIRKLQHTCLANHMLTLGDRFFVEKMNWPGLAHRAKETSISEKTGRYKRKKRFGKSLANKAPAMFISILKRKCETLGLPGVVEVDTYNLKASQYNHLSDTCEKKSLSERWNYMPISDGSDSSKTKRIQRDLYSAFLLQHTIPQPCSFDKEALRIDYPNFVTMHDAEIHRLGSLPKTITSMGVRRSHS

SEQ ID NO: 2353 - protein, 511 aa, unidentified
  REGION 1..511: note = Category: MG81 effectors
  REGION 1..511: note = Description: MG81-634 effector
  source 1..511: note = uncultivated organism sequence
MKKSNTDTCCLTLPLKLEKWQEDRLAKRFEIARQIYNTMVHAELKKLRNIENSQPYRQIQKQIEALNWKNQNDKARLKSLYNDRNKLLNTIGFSEYGFKADIKYYYKHFNDNIGSSVAVHGIAPQVWAAFEKMLFHKEGKKVHYKKKDDIHSLHGYSVTGKSGGVEIIFRKTYIEWKGLKLPLKRSPDNAYETEMLGRRVKYVRLLRKPGKRKDCWYAQLSLEGKPAIKRDPESGKRRHSIGRGAVGLDIGPQTLAYSACGAADLVELADQVQNIEQMKRRLQRKLDRSRRATNPDNYADNGTIRRGVKLTHNKSNRYRRTQRELRYLQHCQAEIRKRQHIELANHLLALGDCFYVEDMAWPSLTHRAKETAISEKTGRIKRKKRFGKSVANKAPATLIGILEQKCNSLGLPGVVKVPTSLRASQYNHQSGEYTSKPLSQRWNNMPDGERIQRDLYSAFLLQHYDSKAGNFDSALLQQDYPQFVQYHHRAIQRLSTVPKTLSSMGIQRSLR

SEQ ID NO: 2354 - protein, 511 aa, unidentified
  REGION 1..511: note = Category: MG81 effectors
  REGION 1..511: note = Description: MG81-635 effector
  source 1..511: note = uncultivated organism sequence
MKKSNTDTCCLTLPLKLEKWQEDRLSKRFEIARQIYNTMVHAELKKLRNIENSQPYRQIQKQIEALNWKNQNDKARLKSLYNDRNKLLNTIGFSEYGFKADIKYYYKHFNDNIGSSVAVHGIAPQVWAAFEKMLFHKEGKKVHYKKKDDIHSLHGYSVTGKSGGVGIIFRKTYIEWKGLKLPLKRSPDNAYETEMLGRRVKYVRLLRKPGKRKDCWYAQLSLEGKPAIKRDPESGKRRHSIGRGAVGLDIGPQTLAYSACGAADLVELADQVQNIEQMKRRLQRKLDRSRRATNPDNYADNGTIRRGVKLTHNKSNRYRRTQRELRYLQHCQAEIRKRQHIELANHLLALGDCFYVEDMAWPSLTHRAKETAISEKTGRIKRKKRFGKSVANKAPATLIGILEQKCNSLGLPGVVKVPTSLRASQYNHQSGEYTSKPLSQRWNNMPDGERIQRDLYSAFLLQHYDPKAGNFDSALLQQDYPQFVQYHHRAIQRLSTVPKTLSSMGIQRSLR

SEQ ID NO: 2355 - protein, 511 aa, unidentified
  REGION 1..511: note = Category: MG81 effectors
  REGION 1..511: note = Description: MG81-636 effector
  source 1..511: note = uncultivated organism sequence
MKKSNTDTCCLTLPLKLEKWQEDRLAKRFEIARQIYNTMVHAELKKLRNIEISQPYRQIQKQIEALNWKNQNDKARLKSLYNDRKKLLNTIGFSEYGFKADIKYYYKHFNDNIGSSVAVHGIAPQVWAAFEKMLFHKEGKKVHYKKKDDIHSLHGYSVTGKSGGVEIIFRKTYIEWKGLKLPLKRSPDNAYETEMLGRRVKYVRLLRKPGKRKDCWYAQLSLEGKPAIKRDPESGKRRHSIGRGAVGLDIGPQTLAYSACGAADLVELADQVQNIEQMKRRLQRKLDRSRRATNPDNYADNGTIRRGVKLTHNKSNRYRRTQRELRYLQHCQAEIRKRQHIELANHLLALGDCFYVEDMAWPSLTHRAKETAISEKTGRIKRKKRFGKSVANKAPATLIGILEQKCNSLGLPGVMKVPTSLRASQYNHQSGEYTSKPLSQRWNNMPDGERIQRDLYSAFLLQHYDPKAGNFDSALLQQDYPQFVQYHHRAIQRLSTVPKTLSSMGIQRSLR

SEQ ID NO: 2356 - protein, 509 aa, unidentified
  REGION 1..509: note = Category: MG81 effectors
  REGION 1..509: note = Description: MG81-637 effector
  source 1..509: note = uncultivated organism sequence
MRSTTETCCLTLPLVLEKWQSDRLEKRFEIARQIYNTLLNFELKKLRRLEQSEEYVAIQENIQTELQSEKPDQAARTALYRQRDKLRKDAGFTEYAFKTDIKDFYKHFKTNIASSVAVHGIAPQVWAAFDKLFYKNGKAVHFKKRGDLRSVQGYSTKKRSGGTEIIFRGTYVEWNKLKLPVKLDPGNAYETEMLQKFVKYCRILKKPGKKKPRWYVQLMLEGKPAVKREKFTEAIKHPVGSGPVGIDIGPQTIAYAAETETALEELAEGVQNIEREKRLLQRKLDRSRRSTNPDNFQADGTVKRGVKLQWNKSKRYQRIQHELAFLQHQQAELRKRQHIQLANHLLSLGDRFYVEDMDWPALTHRAKDTAISEKTGKFKRKKRFGKSVGNKAPATFLGILNQKLLSRGYPGIVKVPTSVKASQFNHITGDFQKKPLSQRWNDMPDGRRIQRDMYSAFLLQHMNEQNDGFDVDALHRDYQRFLAQHDAMIRELQKKKKTISSMGIARNAS

SEQ ID NO: 2357 - protein, 371 aa, unidentified
  REGION 1..371: note = Category: MG81 effectors
  REGION 1..371: note = Description: MG81-638 effector
  source 1..371: note = uncultivated organism sequence
MFREDRIIWNQQGNRDRKKVKREFLLKLSPDNPYEAEMLKRHVKFVRILRKDGKTKPHWYAQLVLEGKPAVKRDPISSAPKHPVGHGVVGIDIGTRTLAYSTDKEVNLLELADHVQNIEQEKRRLQRKMDRSRRATNPENYNPDGTFKRGVKLTRNKSKRYRRIQHQLAMIQHHQADIRKQQHNELANYLLTLGDCFFVENMSYCDLVHRANKTEISEKTGRYKRKKRFGKSIANKAPAMLITMLKQKCQSRGLKGVKEVDTHVRASQYNHQTDTCIEKALENRWNVMPDGERIQRDLYSAFLLQHCKQGLPEYNRKELKKEFGEELYRVFDREALQRDYPQFVAYHHMTIQRLSELPHTIPSMGIRRIIS

SEQ ID NO: 2358 - protein, 503 aa, unidentified
  REGION 1..503: note = Category: MG81 effectors
  REGION 1..503: note = Description: MG81-639 effector
  source 1..503: note = uncultivated organism sequence
MLPDTAFKTGKWQEDRLAKRFEIARQIYNTMVRAELKKLRAMEQSEPYKANQEKIQALDWKTQTDKQALKALYKERDKLLRDGGFSEYGFKSDIKNYYKHFNNNIGSNVAFHGIAPQVWAAFEKMLFKKEGKKVHFKKKGDIHSLRGYSAAGKSGGVEIIFRETYIEWKGLKLPLKLSPDNIYETQMLSYRVKYVRLLRKPGKRKDRWYAQLSLEGKPVIKYNPKTGEVRHPIGKGAVGLDIGPQTLAYSAATGADLVELANQVQNVEQEKRRLQRKLDRSRRATNPGNYADDGTIRRGIALTHNKSKRYLRTQQELKYLQHQQAEIRKRQHTELANHLLSLGDCFYVEKMVWTSLTHRAKETEISEKTGKIKRKKRFGKSVANKAPATLIGILQRKSAALGIPGVIEVPTSVKASQYNHQSGTYTPKPLSQRWNNMPDGERIQRDLYSAFLLQHYDPQTNTFDANSLHQDYPQFVQYHHDAVLRLYAMPKTPSSMGIKRSLR

SEQ ID NO: 2359 - protein, 512 aa, unidentified
  REGION 1..512: note = Category: MG81 effectors
  REGION 1..512: note = Description: MG81-640 effector
  source 1..512: note = uncultivated organism sequence
MPTKQKEGGNRCVLTLPLLTEPWQEHIIEKRFKIIEHLKNQLISIELRKLKKLQRTKAYKNLIKQIESVPKSERTVLYKERNKMLKDAGFSQYTFMDDMARKKSLMQKHFESHINVQIAHKAAIDVWSSFEKFLFGTGQIVHYQKRGTLSSVASKSPKTGMFYYSDENIFKWSGGGTKPKGGIILCLRVASVKTNYEKEMVANNEIKYYRVVRKWMKTKYKYYLQITFAGKPADKHREISTGRVGIDIGTQTIAIASDKSVKLLELADKVNKNHIKKCELQRKLDRSRRYTNPDNFNPDGTVKRGTKGHKLKWNKSKHYLEVAGKIRELERKNADIRKYQHTCLANDILAMGNQIYIEPMNYKGLQKRAKETQVDEKGRYKKKKRFGKSLANKAPAMFVTILKTKAEQHGGEVYEVDIMSYRASQCDHTTGEYTKHGLNDRWRILGNGDKVQRDLYSAFLIKNSNKTHDEIDLDKCSKTYDSFKKLHDKEIENIRNEVILRKRRNISSYGIA

SEQ ID NO: 2360 - protein, 162 aa, unidentified
  REGION 1..162: note = Category: MG81 effectors
  REGION 1..162: note = Description: MG81-641 effector
  source 1..162: note = uncultivated organism sequence
MGNQIYIEPMNYKGLQKRVKETQVDEKGRYKKKKRFGKSLANKAPSMFVTILKTTAEQHGGEVYEVDIMSYRASQCDHTTGEYTKHGLNDRWRILGNGDKVQRDLYSAFLIKNSNKTHDEIDLDKCSKTYDNFKKLHDKEIENIRNEVKLRERRNISSYGIA

SEQ ID NO: 2361 - protein, 521 aa, unidentified
  REGION 1..521: note = Category: MG81 effectors
  REGION 1..521: note = Description: MG81-644 effector
  source 1..521: note = uncultivated organism sequence
MMATWKGGIPVGKSSTDTCCLTLPLKLEKWQEDRLAKRFEIARQIYNTMVRAELKKMDRVKQLPEYRKNQKEIQALDWKNSADKQRLKELYGNQNRILQKQGFTKYGFKSDSKDYYKHFIENIGSSVATHCIAPQVWNAFDKMLFQKDGKVVHFKRYGDVHSLKGGSVTNKSGGAEIMFRKTYIEWKGLKLPLKLSPNNAYEAEMLSYRVKYVRILRTRGKTKDRWYAQFSLEGKPAVKYDSSTGKPVHPVGRGAVGLDIGPQTLAYAAANEANLVELADQVQNIEQEKRRLQRKLDRSRRATNPDNYNENGTIRKGVKLTHNKSKRYCKLQKELSWIQHCQAETRKRQHIALANHLLSLGDCFYVEPMAWPSLTHRAKKTEVSEKTGRIKRKKRFGKSVANKAPASLIGILKLKCISLGLTGVVEVPMLLKASQYNHQSKDYAPKSLSQRWNDMPDGNRIQRDLYSAFLLQHYNSQLENFNQETLERDYPQFVRLHNQTIQRLSALPKTPSSMGIRRSVS

SEQ ID NO: 2362 - protein, 528 aa, unidentified
  REGION 1..528: note = Category: MG81 effectors
  REGION 1..528: note = Description: MG81-645 effector
  source 1..528: note = uncultivated organism sequence
MAKKNNNNNNTDTCVLTLPLRVEKWQEDCLLKRFEAARRIYNSLLNFELKKLRQLERTVEYRQIQSVISSAYRSNTKDSPECKAALKRREKLIDENGLTKNGFKNDVKFFYKHFDGLIGSSVAVHCIAVQLWAAFNKYLCGNGKEIHFKRLGDISSLKGYSVKGKSGGCEIIFRGQYVEWTRKKKKLLLPLKIDPDNEYEREMLSRRVKYVRIIKKPGKNRLRWYAQLTLEGKPALKYSAETGKPIHSVGKGDVGIDIGPQTVAYASDKEVALLELADRVTNIEHQKKKLQRKLDRSRRATNPDNYKPDGTIKRGVKLTRNKSKRYLKLQSKLAYIQHRQAEIRKLQHTCLANHMLTLGDRFFVEKMNWPGLAHRAKETSISEKTGRYKRKKRFGKSLANKAPAMFISILKQKCETLGLPGVVEVDTFRLKASQYNHLSDTCEKKSLSERWNYMPISDGSDSSKTKRIQRDLYSAFLLQHTIPQSCSFDKEALRIDYPNFVTMHDAEIHRLESLPKTITSMGVRRSHS

SEQ ID NO: 2363 - protein, 365 aa, unidentified
  REGION 1..365: note = Category: MG81 effectors
  REGION 1..365: note = Description: MG81-646 effector
  source 1..365: note = uncultivated organism sequence
MIEKTNLKTLKVRVKDKHQSILERMAFEVNQVWNAANEITATYSYIPVPEVGWLRNNFSAFDLQKDLKSIKAERGFILHSTTIQEVIAVHYKSRRQFKTDKLRWRVSGGTRRSLGWIPFKSGAAQWKNGQVYFAGHFFKVWDSYGLSQFEFRSGSFSQDSRGRWYFNIVVEAAQIASQATGQVGIDLGLKEVATCSNGLKLESKQFYRQLETKLGVAQRANKKQRVKAIHAKIKNRRLNHIHQFTTRLVKDNALIVVGNVNSSQLAKTKMAKSVLDAGWYILKTQLDYKSKAMQAVFIEVNESYTTQACSCCGSISANSPKGRAGLRIREWSCPECGALHDRDINAAKNILALGHERLAAGIRAL

SEQ ID NO: 2364 - protein, 354 aa, unidentified
  REGION 1..354: note = Category: MG81 effectors
  REGION 1..354: note = Description: MG81-647 effector
  source 1..354: note = uncultivated organism sequence
MVGHLCRPHRHAPAVERHRAGDLVRVRARLGGERRQERRYKKGIKTRDQSRGWHQAVLMVQRYHREIADARADALHQCSRRIVDMGAETIVMRDNDVAGMLARDAQNTDADRQRRNRIAPLVAQMGGMYELRRQVTYKQQWAGGRVELVPEHEPTTLRCSVCLAVRDTDPGYPEFSCPSCGHVEDREANSARNLLDYVPPPENGSDKNFTGTGNGDGGAGGRAVRQKRGRKPKRMAGGTGPLEAEQSAASPEGGATSVLGPGNHAPDAQAPGVTDAAAASVAAAIQVDGGMVPPPRKRHTTAHERERSSDADPATESSRALGGERATRKRDRSQSVPQRRGSPRDPQEPSGAAA

SEQ ID NO: 2365 - protein, 511 aa, unidentified
  REGION 1..511: note = Category: MG81 effectors
  REGION 1..511: note = Description: MG81-648 effector
  source 1..511: note = uncultivated organism sequence
MKKSNTDTCCLTLPLKLEKWQEDRLAKRFEIARQIYNTMVHAELKKLRNIENSQPYRQIQKQIEALNWKNQNDKARLKSLYNDRNKLLNTIGFSEYGFKADIKYYYKHFNDNIGSSVAVHGIAPQVWAAFEKMLFHKEGKKVHYKKKDDIHSLHGYSVTGKSGGVEIIFRKTYIEWKGLKLPLKRSPDNAYETEMLDRRVKYVRLLRKPGKRKDCWYVQLSLEGKPAIKRDPESGERRHSIGRGAVGLDIGPQTLAYSACGAADLVELADQVQNIEQMKRRLQRKLDRSRRATNPDNYADNGTIRRGVKLTHNKSNRYRRTQRELRYLQHCQAEIRKRQHIELANHLLALGDCFYVEDMAWPSLTHRAKETAISEKTGRMKRKKRFGKSVANKAPATLIGILEQKCNSLGLPGVVKVPTSLRASQYNHQSGEYTSKPLSQRWNNMPDGERIQRDLYSAFLLQHYDPKAGNFDSALLQQDYPQFVQYHHRAIQRLSTVPKTLSSMGIQRSLR

SEQ ID NO: 2366 - protein, 523 aa, unidentified
  REGION 1..523: note = Category: MG81 effectors
  REGION 1..523: note = Description: MG81-649 effector
  source 1..523: note = uncultivated organism sequence
MPTKQKEDSNRCVLTLPLLTEPWQEHIIEKRFKIIEHLKNQLISIELRKLKKLQRTKAYKNLIKQIESVPKSERTVLYKKRNKMLKDAGFSQYTFMDDMAGKKSLMQKHFESHINVQIAHKAAIDVWSSFEKFLFGTGQMIHYQKRGTLKSIASKSPKNGMHYFPESNTFKWSGGRQKKIGQKGEQKKVSIKPISLCLRVSPLKTDYEKEMVANNEIKYYRVVRKWMKTKYKYYLQITFAGKPADKHREISTGRVGIDIGTQTIAIASDKSVKLLELADKVNKNHIKKCELQRKLDRSRRYTNPDNFNPDGTVKRGTKGHKLKWNKSKHYIEIAGKIRELERKNADIRKYQHTCLANDILAMGNQIYIEPMNYKGLQKRAKETQVDEKGRYKKKKRFGKSLANKAPAMFVTILKTKAEQHGGEVYEVDIMSYRASQCDHTTGEYTKHSLNDRWRILGNGDKVQRDLYSAFLIKNSNKTHDEIDLDKCSKTYDIFKKLHDKEIENIRNEVKLRERKNISSYGIA

SEQ ID NO: 2367 - protein, 512 aa, unidentified
  REGION 1..512: note = Category: MG81 effectors
  REGION 1..512: note = Description: MG81-650 effector
  source 1..512: note = uncultivated organism sequence
MPTKQKEDSNRCVLTLPLLTEPWQEHIIEKRFKIIEHLKNQLISIELKKLKNLQRTKAYKNLIKQIESVPKSERTALYKERNKMLKDAGFSQYTFMDDMAGKKSLMQKHFESHINVQIAHKAAIDVWSSFEKFLFGTGQMIHYQKRGTLSSVASKSPKTGMFYYSDENIFKWSGGGTKPKGGIILCLRVASVKTNYEKEMVANNEIKYYRVVRKWMKTKYKYYLQITFAGKPADKHREISTGRVGIEIGTQTIAIASDKSVKLLELADEVNKNHIKKCELQRKLDRSRRYTNPDNFNPDGTVKRGTKGYKLKWNKSKHYIEIAGKIRELERKNADIRKYQHTCLANDILAMGNQIYIEPMNYKGLQKRAKETQVDEKGRYKKKKRFGKSLANKAPAMFVTILKTKAEQHGGEVYEVDIMSYRASQCDHTTGEYTKHGLNDRWRILGNGDKVQRDLYSAFLIKNSNKTHDEIDLDKCSKTYDNFKKLHDKEIENIRNEVILRKRRNISSYGIA

SEQ ID NO: 2368 - protein, 512 aa, unidentified
  REGION 1..512: note = Category: MG81 effectors
  REGION 1..512: note = Description: MG81-651 effector
  source 1..512: note = uncultivated organism sequence
MKKSNTDTCCLTLPLKLGKWQEDRLAKRFEIARQLYNTLVHAELKRLAQVKQTAEYRENERKIRTLDWNDPGDQAKLKGLYKERRKSLKTAGFTDYSFTTDMGKYYKHFRDNIGSNVALHGIAPQVWAAFDKLLFKKGGKKVHYKKPGEVNSVQGYSRTGKSGGTEIMFREPYIEWKGLKLPLKLSPDNAYETDMLQRRVKLVRLVRRPGKRRDRWYAQLVLEGKPAIKADPVTGKAVHPIGSGPVGLDIGPQTLAYSAAGAAGLVELADRVQNIEQEKRRLQRKMDRSRRAANPDNYAEDGTIRRGVKLTHNKSKRYRRSQQELKYLQHRQAEIRKLQHIQFANHLLSLGDHFYVEKMEWSSLTHRAKETVISEKTGKPRSKRRFGKSIANKAPAMLIEILRQKCKSLGLSDVVEINPADIKASQYNHLTGEYVKKSLSRRWNDMQDGEHLQRDLYSAFLLQHYDSCSKTLDHDSIVRDYPAFVQYHHREIERLHALPKTPSSMGIRRSIA

SEQ ID NO: 2369 - protein, 512 aa, unidentified
  REGION 1..512: note = Category: MG81 effectors
  REGION 1..512: note = Description: MG81-652 effector
  source 1..512: note = uncultivated organism sequence
MPTKQKEDSNRCVLTLPLLTEPWQEHIIEKRFKIIEHLKNQLISIELRKLKNLQRTKAYKNLIKQIESVPKSERTVLYKERNKMLKDAGFSQYTFMDDMAGKKSLMQKHFESHINVQIAHKAAIDVWSSFEKFLFGTGQIVHYQKRGTLSSVASKSPKTGMFYYSDENIFKWSGGGTKPKGGIILCLRVASVKTNYEKEMVANNEIKYYRVVRKWMKTKYKYYLQITFAGKPADKHREISTGRVGIDIGTQTIAIASDKSVKLLELADKVNKNHIKKCELQRKLDRSRRYTNPDNFNPDGTVKRGTKGHKLKWNKSKHYIEIAGKIRELERKNADIRKYQHTCLANDILAMGNQIYIEPMNYKGLQKRAKETQVDEKGRYKKKKRFGKSLANKAPAMFVTILKTKAEQHGGAVYEVDIMSYRASQCDHTTGEYTKHGLNDRWRILGNGDKVQRDLYSAFLIKNSNKTHDEIDLDKCSKTYDSFKKLHDKEIENIRNEVMLRGRKNISSYGIA

SEQ ID NO: 2370 - protein, 512 aa, unidentified
  REGION 1..512: note = Category: MG81 effectors
  REGION 1..512: note = Description: MG81-653 effector
  source 1..512: note = uncultivated organism sequence
MPTKQKEDSNRCVLTLPLLTEPWQEHIIEKRFKIIEHLKNQLISIELRKLKNLQRTKAYKNLIKQIESVPKSERTVLYKERNKMLKDAGFSQYTFMDDMAGKKSLMQKHFESHINVQIAHKAAIDVWSSFEKFLFGTGQIVHYQKRGTLSSIASKSPKTGMFYYSDENIFKWSGGGTKPKGGIILCLRVASVKTNYEKEMVANNEIKYYRVVRKWMKTKYKYYLQITFAGKPADKHREISTGRVGIDIGTQTIAIASDKSVKLLELADKVNKNHIKKCELQRKLDRSRRYTNPDNFNPDGTVKRGTKGHKLKWNKSKHYLEIAGKIRELERKNANIRKYQHTCLANDILAMGNQIYIEPMNYKGLQKRAKETQVDEKGRYKKKKRFGKSLANKAPAMFVTILKTKAEQHGGEVYEVDIMSYRASQCDHTTGEYTKHGLNDRWRILGNGDKVQRDLYSAFLIKNSNKTHDEIDLDKCSKTYDSFKKLHDKEIENIRNEVILRKRRNISSYGIA

SEQ ID NO: 2371 - protein, 512 aa, unidentified
  REGION 1..512: note = Category: MG81 effectors
  REGION 1..512: note = Description: MG81-654 effector
  source 1..512: note = uncultivated organism sequence
MPTKQKEGGNRCVLTLPLLTEPWQEHIIEKRFKIIEHLKNQLISIELRKLKKLQRTKAYKNLIKQIESVPKSERTVLYKERNKMLKDAGFSQYTFMDDMAEKKSLMQKHFESHINVQIAHKAAIDVWSSFEKFLFGTGQIVHYQKRGTLSSVASKSPKTGMFYYSDENIFKWSGGGTKPKGGIILCLRVASVKTNYEKEMVANNEIKYYRVVRKWMKTKYKYYLQITFAGKPADKHREISTGRVGIDIGTQTIAIASDKSVKLLELADKVNKNHIKKCELQRKLDRSRRYTNPDNFNPDGTVKRGTKGHKLKWNKSKHYLEVAGKIRELERKNADIRKYQHTCLANDILAMGNQIYIEPMNYKGLQKRAKETQVDEKGRYKKKKRFGKSLANKAPAMFVTILKTKAEQHGGEVYEVDIMSYRASQCDHTTGEYTKHGLNDRWRILGNGDKVQRDLYSAFLIKNSNKTHDEIDLDKCSKTYDSFKKLHDKEIENIRNEVILRKRRNISSYGIA

SEQ ID NO: 2372 - protein, 512 aa, unidentified
  REGION 1..512: note = Category: MG81 effectors
  REGION 1..512: note = Description: MG81-655 effector
  source 1..512: note = uncultivated organism sequence
MPTKQKEGGNRCVLTLPLLTEPWQEHIIEKRFKIIEHLKNQLISIELRKLKNLQRTKAYKNLIKQIESVPKSERTVLYKERNKMLKDAGFSQYTFMDDMAGKKSLMQKHFESHINVQIAHKAAIDVWSSFEKFLFGTGQIVHYQKRGTLSSVASKSPKTGMFYYSDENIFKWSGGGTKPKGGIILCLRVASVKTNYEKEMVANNEIKYYRVVRKWMKTKYKYYLQITFAGKPADKHREISTGRVGIDIGTQTIAIASDKSVKLLELADKVNKNHIKKCELQRKLDRSRRYTNPDNFNPDGTVKRGTKAHKLKWNKSKHYIEIAGKIRELERKNADIRKYQHTCLANDILAMGNQIYIEPMNYKGLQKRAKETQVDEKGRYKKKKRFGKSLANKAPAMFVTILKTKAEQHGGEVYEVDIMSYRASQCDHTTGEYTKHGLNDRWRILGNGDKVQRDLYSAFLIKNSNKTHDEIDLEKCSKTYDNFKKLHDKEIENIRNEVILRKRRNISSYGIA

SEQ ID NO: 2373 - protein, 511 aa, unidentified
  REGION 1..511: note = Category: MG81 effectors
  REGION 1..511: note = Description: MG81-656 effector
  source 1..511: note = uncultivated organism sequence
MGKSSTDTCCLTLPLKLEKWQEDRLAKRFEIARQIYNTMVRAELKRLRQVEQSPQYRSNKKAIQALDWKNTADKPKLKTLYRERDKLLKGGGFTEYGFKSDIKNFYKHFAENIGSSVAVHGIAPQVWAAFERVLFKKEGKKVHFKKTGDIRSLRGYSVTGKSGGVEIIFRGSYIEWKGLNLPLKLSPDNAYETEMLSYRVKYVRILRKPGKTRDRWYAQLSLEGKPAIKRNPASGNPVHPVGQGAVGLDIGPQTLAYAAEKEANLVELADRVQNIEREKHLLQRKMDRSRRAANPDNYAENGTIRRGVKLTHNKSKRYLRLQRELCYLQHCQAETRKRQHTELANHLLSLGSCFYVEDMAWPSLTHRAKKTEISDKTGRIKRKKRFGKSIANKAPAALINILRTKCVSLGIPGVVEVPTSLKASQYNHQSKEYTPKPLSQRWNDMPDGSRIQRDLYSAFLLQHYDPQSGNFDQASLEADYPQFVQLHNQSIQRLLTVPKAPSSMGIRRSVS

SEQ ID NO: 2374 - protein, 512 aa, unidentified
  REGION 1..512: note = Category: MG81 effectors
  REGION 1..512: note = Description: MG81-657 effector
  source 1..512: note = uncultivated organism sequence
MPTKQKEDSNRCVLTLPLLTEPWQEHIIEKRFKIIEHLKNQLISIELRKLKNLQRTKAYKNLTKQIESVPKSERTALYKERNKMLKDAGFSQYTFMDDMAGKKSLMQKHFESHINVQIAHKVAIDVWSSFEKFLFGTGQIVHYQKRGTLSSVASKSPKTGMFYYSDENIFKWSGGGTKPKGGIILCLRVASVKTNYEKEMVANNEIKYYRVVRKWMKTKYKYYLQITFAGKPADKHREISTGRVGIDIGTQTIAIASDKSVKLLELADKVNKNHIKKCELQRKLDRSRRYTNPDNFNPDGTVKRGTKGHKLKWNKSKHYIEIAGKIRELERKNADIRKYQHTCLANDILAMGNQIYIEPMNYKGLQKRVKETQVDEKGRYKKKKRFGKSLANKAPAMFVTILKTKAEQHGGEVYDVDIMSYRASQCDHTTGEYTKHGLNDRWRILGNGDKVQRDLYSAFLIKNSNKTHDEIDLDKCSKTYDNFKKLHDKEIENIRNEVKLRERKNISSYGIA

SEQ ID NO: 2375 - protein, 341 aa, unidentified
  REGION 1..341: note = Category: MG81 effectors
  REGION 1..341: note = Description: MG81-658 effector
  source 1..341: note = uncultivated organism sequence
MVGRRNKTKGWYYSLLAVASVKTNYEKEMVANNEIKYYRVVRKWMKTKYKYYLQITFAGKPADKHREISTGRVGIDIGTQTIAIASDKSVKLLELADKVNKNHIKKCELQRKLDRSRRYTNPDNFNPDGTVRRGTKGHKLKWNKSKHYIEIAGKIRELERKNSDIRKYQHTCLANDILAMGNQIYIEPMNYKGLQKRAKETQVDEKGRYKKKKRFGKSLANKAPSMFVTILKTKAEQHGGEVYEVDIMSYRASQCDHTTGEYTKHGLNDRWRILGNGDKVQRDLYSAFLIKNSNKTHDEIDLDKCSKTYDNFKKLHDTEIENIRNEVKLRERKNISSYGIA

SEQ ID NO: 2376 - protein, 360 aa, unidentified
  REGION 1..360: note = Category: MG81 effectors
  REGION 1..360: note = Description: MG81-659 effector
  source 1..360: note = uncultivated organism sequence
MFTYRYRIRDSSSKVRLKKLASSVNFVWNYVNKLSFENIKQHGRFLSTYDVNYYLNGCSKGLEIGSSSIQEIARFYVQTRQQFKKRKLSWRSAKRSLGWVPLRHDGFKLKNDTVRYCGHDFKLWKHRELPQGAKIKTGSFVQDARDRWYLNVSFEVPDVEVHALPRTEVGIDLGIKNQLTLSTGENFTRGSETKKFAVDLAHAQRARKKKRMKAVSAKAANRRSDWTHKVTTDIVRRFATVFVGDLKTSELVAKSSLSNFSSLYDASIGSIKHCLKYKAKKLGGACYVVNEAYTSVTCYFCEARSGPTGKGGLAIREWTCQSCGAVHHRDVNAARNILRRGHSTLQRSLIGGDATLSTSA

SEQ ID NO: 2377 - protein, 511 aa, unidentified
  REGION 1..511: note = Category: MG81 effectors
  REGION 1..511: note = Description: MG81-660 effector
  source 1..511: note = uncultivated organism sequence
MAKCSTDTCCLTLPLRLEKWQEDRLAKRFEIARQIYNTMVRAELKKLRAMEQSEPYKANQEKIQALDRKTQTDKQALKALYKERDKLLRDGGFSEYGFKSDIKNYYKHFNNNIGSNVAFHGIAPQVWAAFEKMLFKKEGKKVHFKKKGDIHSLRGYSAAGKSGGVEIIFRETYIEWKGLKLPLKLSPDNIYETQMLSYRVKYVRLLRKPGKRKDRWYAQLSLEGKPVIKYNPKTGEVRHPIGKGAVGLDIGPQTLAYSAATGADLVELANQVQNVEQEKRRLQRKLDRSRRATNPGNYADDGTIRRGIALTHNKSKRYLRTQQELKYLQHQQAEIRKRQHTELANHLLSLGDCFYVEKMVWTSLTHRAKETEISEKTGKIKRKKRFGKSVANKAPATLIGILQRKSAALGIPGVIEVPTSVKASQYNHQSGTYTPKPLSQRWNNMPDGERIQRDLYSAFLLQHYDPQTNTFDANSLHQDYPQFVQYHHDAVLRLYAMPKTPSSMGIKRSLR

SEQ ID NO: 2378 - protein, 512 aa, unidentified
  REGION 1..512: note = Category: MG81 effectors
  REGION 1..512: note = Description: MG81-661 effector
  source 1..512: note = uncultivated organism sequence
MPTKQKEGGNRCVLTLPLLTEPWQEHIIEKRFKIIEHLKNQLISIELRKLKNLQRTKAYKNLIKQIESVPKSERTALYKERNKMLKDAGFSQYTFMDDMAGKKSLMQKHFESHINVQIAHKAAIDVWSSFEKFLFGTGQIVHYQKRGTLSSVASKSPKTGMFYYPDENIFKWSGGGTKPKGGIILCLRVASVKTNYEKEMVANNEIKYYRVVRKWMKTKYKYYLQITFAGKPADKHREISTGRVGIDIGTQTIAIASDKSVKLLELADKVNKNHIKKCELQRKLDRSRRYTNPDNFNPDGTVKRGTKGHKLKWNKSKHYIEIAGKIRELERKNADIRKYQHTCLANDILAMGNQIYIEPMNYKGLQKRAKETQVDEKGRYKKKKRFGKSLANKAPAMFVTILKTKAEQHGGEVYEVDIMSYRASQCDHTTGEYAKHGLNDRWRILGNGDKVQRDLYSAFLIKNSNKTHDEIDLDKCSKTYDNFKKLHDKEIENIRNEVILRKRRNISSYGIA

SEQ ID NO: 2379 - protein, 578 aa, unidentified
  REGION 1..578: note = Category: MG81 effectors
  REGION 1..578: note = Description: MG81-662 effector
  source 1..578: note = uncultivated organism sequence
MAFGSKNSTPSFVLTLPMVIGLNEQDLLYKEFKKCGIIYNQLVSVTTKMWHQLRKTRKYRELMAAIAKATPDSDEQKALFKRREKMLKEYRFSEDAFHAMVVPYAKHYAINSHVAQSVATAVWAAWSSFFFDNGKEVHYKKLEQVSSIFGKNNATGIILRPANCTTSVINSAKKKIKNSIEEKYFAAYRKPDAKEDEEVALPDEVKTQMEKEIAAATAKVKTSIGKGELRIVYGDYTFPLTLRNPNTQTGWYQQEALKCGVKYCRIIRKWVGTKWKYYAQIVLEGYPPIKCDSNGVAKHSVKQGRVGIDIGTQTIAFSGKDVCDLRVLAPSARAQAKSLVNEIAATLRAMDRSRRATNPKYYNPDGTIKRLKRQHGQKQRREWKYSKRYYRLRAKLRNLYRKLADIRKMEHNILANELLAHGNEFVVEDMNYKALQKRSKETKINPKTGRTHTKKRFGKSLSRCAPATFISILSKKANRYGGTVIKVSTFETKASQFDHTDESYTKKKLSERMARLRSGDIVQRDLYSAFLLEHIDTESLQYNMETLNSAFPAFLEMHENTKQRLQAVGSSLPASIGF

SEQ ID NO: 2380 - protein, 578 aa, unidentified
  REGION 1..578: note = Category: MG81 effectors
  REGION 1..578: note = Description: MG81-663 effector
  source 1..578: note = uncultivated organism sequence
MAFGSKNSTPSFVLTLPLDINLNEQDYLYKEFKKCGIIYNQLVSVTIKMWHQLRKTRKYRELMAAIAKSASDSDEQKTLYKQREKILKEHHFSEDSFHKLVVPYAKHYAIHSHVAQAIATDVWKAWKSFFFSKGKEVHYKRLDDVSSISGKNNATGIVLRPAKLTTSNLASAKRKVQKTVEQRYYKAYGQSDPKDDKKVILPDSVIPQMEAEIAVAVAKVKPAVGNGSLRIVYGKHEFPVVVRNSNTQTGKYQQEALKCGVKFCRITRKWVKIKWKYYAQLVLEGYPPTKCDSNGVIKHPIKQGCVGLDIGTQTLAISGSDICDLRLLAPSARAQAKGLVNEIARTQRAMDRSRRATNPDCYNPDGTIKRLKCQHGHKQKRDWKYSKRYYRLRARLRDLNRRLADIRKMEHNILANELLEHGNEFIVEDMNYKALQKRSKETKVNAKTGRIHTKKRFGKSLSRCAPAMFITILTNKVTRYGGKVIKVSTFETKASQFDHTDESYTKKKLSERMAHLSSGEVVQRDLYSAFLLEHIDTESLEYNTEALKSAFPAFLKMHENTKKHLQKEENNLPASVGF

SEQ ID NO: 2381 - protein, 578 aa, unidentified
  REGION 1..578: note = Category: MG81 effectors
  REGION 1..578: note = Description: MG81-664 effector
  source 1..578: note = uncultivated organism sequence
MAFGSKNSMPSFVLTLPLDISLNEQDYLYKEFKKCGVIYNQLVSATTKMWHQLRKTRKYRELMAAIAKATPDSDEQKTLFKQREKMLKEYRFSEDAFHKLVVPYAKHYAINSHIAQAVASNVWKAWSTFFFSKGKEVHYKRLDDLAAISGKNNFTGFVLRPANLTTSNIESAKRKAQKAVEKRYDDMYGRPDPKDDKKVVLPDEVKPQMEAEIAAAIAKIKPTIGEGNLRIVYGKHEFPVVLRNPKTQTGKYQQEALKCGVKYCRITRKWVKNKWKYYAQFILEGYPPTKCDGNGVMKHPVNQGRIGLDIGTQTLAVSGNDICDLRVLAPSARAQARGLTNEIARTTRAMNRSRRATNPQYFNSDGTIKRLKRQHGHKQKRDWKYSKRYFRLKAKLRDLNRRLADIRKMEHNILANELLEHGNEFVIEDMNYKTLQKRSKETKINAKTGRTHTKKRFGKSLSRCAPAKFITILTNKAVRNGGSVIKVSTFETKASQFDHTDESYTKKKLSERMARLRSGDIVQRDLYSAFLLEYIDTESLEYNTKALNSAFPAFLVMHENTKKRLQKDKSYLPASVGF

SEQ ID NO: 2382 - protein, 578 aa, unidentified
  REGION 1..578: note = Category: MG81 effectors
  REGION 1..578: note = Description: MG81-665 effector
  source 1..578: note = uncultivated organism sequence
MAFGSKNSTPSFVLTLPLNISLNEQDYLYKEFKKCGVIYNQLVSVTTKMWHQLRKTRKYRDLMTAIAKAVPDSEEQKALLKQRQKKIQETGFSEGAFHKMVEPYAKHFAINSHVAQNVASAVWTAWEGFFFSKGKAVHYKKLEDVTSISGKNNATGIVLRPANLTTSNIESAKRKAQKAVEKRYDDMYGRPDPKDDKKVVLPDEVKPQMKAEIAAAIAKIKPTIGKGNLRIVYGKHEFPVVLRNPKTQTGKYQQEALKCGVKYCRITRKWVKTKWKYYAQFILEGYPPTKCDGNGVMKHPVNHGRIGLDIGTQTLAISGKDICDLRVLAPSARAQARGLTNEIARTTRAMNRSRRATNPKYYNSDGTIKRLKRKHGHKQRRDWKYSKRYFRLKAKLRDLNRRLADIRKMEHNILANELLQHGNEFVVEDMNYKALQKRSKETKVNPKTGRAHTKKRFGKSLSRCAPAMFISILNKKANRYGGSVIKVDTFETKASQFDHTDESYTKKRLSERMAHLSSGEVVQRDLYSAFLLEHIDIESLQYNMETLNSAFPAFLEMHENTKRRLQAVGSSLPASIGF

SEQ ID NO: 2383 - protein, 578 aa, unidentified
  REGION 1..578: note = Category: MG81 effectors
  REGION 1..578: note = Description: MG81-666 effector
  source 1..578: note = uncultivated organism sequence
MAFGSKNSTPSFVLTLPMVIGLNEQDLLYKEFKKCGIIYNQLVSVTTKMWHQLRKTRKYRELMAAIAKATPDSDEQKALFKRREKMLKEYRFSEDAFHAMVVPYAKHYAINSHIAQAVASDVWKAWSTFFFSKGKEVHYKRLDDLAAISGKNNSTGIVLRPANLTTNNIESAKRKAQKAVEERYDDMYGRSDPKDDKKVVLPDDVKPQMEAEIAAATAKVKTSIGKGELRIVYGDYTFPLTLRNPNTQTGWYQQEALKCGVKYCRIIRKWVGTKWKYYAQIVLEGYPPIKCDSNGVAKHSVKQGRVGIDIGTQTIAFSGKDVCDLRVLAPSARAQAKSLVNEIAATLRAMDRSRRATNPKYYNPDGTIKRLKRQHGQKQRREWKYSKRYYRLRAKLRNLYRKLADIRKMEHNILANELLAHGNEFVVEDMNYKALQKRSKETKINPKTGRAHTKKRFGKSLSRCAPATFISILSKKANRYGGTVIKVSTFETKASQFDHTDESYTKKKLSERMARLRSGDIVQRDLYSAFLLEHIDTESLQYNMETLNSAFPAFLEMHENTKQRLQAVGSSLPASIGF

SEQ ID NO: 2384 - protein, 578 aa, unidentified
  REGION 1..578: note = Category: MG81 effectors
  REGION 1..578: note = Description: MG81-667 effector
  source 1..578: note = uncultivated organism sequence
MAFGSKNSTPSFVLTLPMVISLNEQDLLYKEFKKCGIIYNQLVCITTKMWHQLRKTRKYRELMADIAKAAPDSDEQKALLKQREKMLKEYRFSENAFHAMVVPYAKHYALHSHVAQMVATAVWAAWSSFFFDNGKEVHYKKLEQVFSISGKNNTTGIMLRPANHTTSVINSAKKKIKGSIEEKYFAAYRKPDAKEGEEVVLPDEVKTQMEKEIAAATAKVKTSIGKGELRLVYGDYTFPLTLRNPDTQAGWYQQEALKCGVKYCRIIRKWVGTKWKYYAQIVLEGYPPIKCDSNGVAKHPVKQGRVGIDIGTQTIAFSCKDVCDLRVLAPSARAQAKSLVNEIAATLRAMNRSRRATNPKYYNPDGTIKRLKRQHGQKQKREWKYSKRYYRLRAKLRNLYRKLADIRKMEHNILANELLAHGNKFVVEDMNYKALQKRSKETKINPKTGRAHTKKRFGKSLSRCAPAMFISILSNKANRYGGSVIKVSTFETKASQFDHTDNSYTKKKLSERMARLRSGDIVQRDLYSAFLLEHIDIESLQYNMETLNSAFPAFLGMHENTKQRLQAVGSSLPASIGF

SEQ ID NO: 2385 - protein, 358 aa, unidentified
  REGION 1..358: note = Category: MG81 effectors
  REGION 1..358: note = Description: MG81-668 effector
  source 1..358: note = uncultivated organism sequence
MVKTFSFRIKDSTSAKHLYAMARAVNFVWNYCNEVQKKAANSHRPWVNWVMLNNLTSGCSKELRLHSQTIQAIDECYATSLKEAKSPTGKKKRFLRFRGRRSQGWIPFKASGIKLRKDSVVYQGRIFRFWKTRSIPEQIKGGNFSCDVRGRWYLNLVCEYEEALVSNEGSVGIDLGLKSLATLSNGKKYDAQKFFRKYERKLAHHQRCNNARQVRTIHAKIANSRKDFNHKVSHELTRDFNKVFIGDVDSLGLLKTRLAKSVSDASWGQLRTFIEYKAIARGGTYYVVDENNTTRTCSACGCLTGPSGLAGLRVREWQCKECGTVHDRDTNSAINIEQRGLSTLHSPLRTLSAKEEIP

SEQ ID NO: 2386 - protein, 512 aa, unidentified
  REGION 1..512: note = Category: MG81 effectors
  REGION 1..512: note = Description: MG81-669 effector
  source 1..512: note = uncultivated organism sequence
MPTKQKEDSNRCVLTLPLLTEPWQEHIIEKRFKIIEHLKNQLISIELRKLKKLQRTKAYKNLIKQIESVPKSERTVLYKKRNKMLKDAGFSQYTFMDDMAGKKSLMQKHFESHINVQIAHKAAIDVWSSFEKFLFGSGQMIHYQKRGTLSSVASKSPKTGMFYYSDENIFKWSGGGTKPKGGIILCLRVAPVKTNYEKEMVANNEIKYYRVVRKWMKTKYKYYLQITFAGKPADKHHEVSTDRVGIDIGTQTIAIASDKSVKLLELADKVNKNHIKKCELQRKLDRSRRYTNPDNFNPDGTVKRGTKGHKLKWNKSKHYIEIAGKIRELERKNADIRKYQHTCLANDILAMGNQIYIEPMNYKGLQKRAKETQVDEKGRYKKKKRFGKSLANKAPAMFVTILKTKAEQHGGEVYEVDIMSYRASQCDHTTGEYTKHGLNDRWRILGNGDKVQRDLYSAFLIKNSNKTHDEIDLDKCSKTYDNFKKLHDKEIENIRNEVILRKRRNISSYGIA

SEQ ID NO: 2387 - protein, 401 aa, unidentified
  REGION 1..401: note = Category: MG81 effectors
  REGION 1..401: note = Description: MG81-670 effector
  source 1..401: note = uncultivated organism sequence
MPTKQKEGGNRCVLTLPLLTEPWQEHIIEKRFKIIEHLKNQLISIELRKLKKLQRTKAYKNLIKQIESVPKSERTVLYKERNKMLKDAGFSQYTFMDDMAGKKSLMQKHFESHINVQIAHKAAIDVWSSFEKFLFGTGQIVHYQKRGTLSSVASKSPKTGMFYYSDENIFKWSGGGTKPKGGIILCLRVASVKTNYEKEMVANNEIKYYRVVRKWMKTKYKYYLQITFAGKPADKHREISTGRVGIDIGTQTIAIASDKSVKLLELADKVNKNHIKKCELQRKLDRSRRYTNPDNFNPDGTVKRGTKGHKLKWNKSKHYLEVAGKIRELERKNADIRKYQHTCLANDILAMGNQIYIEPMNYKGLQKRLKKRKLTKKADIKRKSVLENLLPIKRRQCLLQF

SEQ ID NO: 2388 - protein, 116 aa, unidentified
  REGION 1..116: note = Category: MG81 effectors
  REGION 1..116: note = Description: MG81-671 effector
  source 1..116: note = uncultivated organism sequence
MFVTILKTKAEQHGGEVYEVDIMSYRASQCDHTTGEYTKHGLNDRWRILGNGDKVQRDLYSAFLIKNSNKTHDEIDLDKCSKTYDSFKKLHDKEIENIRNEVILRKRRNISSYGIA

SEQ ID NO: 2389 - protein, 1268 aa, unidentified
  REGION 1..1268: note = Category: MG81 effectors
  REGION 1..1268: note = Description: MG81-672 effector
  source 1..1268: note = uncultivated organism sequence
MKVSKVKHRRTAVSVNKKNNTVKGILYDDPIKKDSKGDGASAYVSTKYVVDDVVRNSSRLYSPFNSKKLIIDDKTKVVANSLRQHFKNFVKIYLNCESIDEQQMKFTPDNKYLMDNRVRISLPSDVNEEKLVEAIVNSSLRKSLNKKCNIQIKAGLRETFDIPELIKKAIKIYCIDEKRNLNDAEKLDMYALFSFMYEDKYKNRQKKLIINSISNQVTKVKVCENGNRLLKLSIADTKKKPLWDFMIEYSNSDKKKQDTMLRNIRKSIVLFVCGVENYKNIENDNKLDICSWDGYDINENQQFVCVNTNNSNDDYFISSTELRRANLDHYMKAVAKLNDDRNKFWFQHFESVIETFFSKKAKRNIERIKSAYLCEYLWRDFCSYVALKYVDLGKGVYHFTMADKLALINRNKYEKSIIFGEIESRYNNGISSFDYERIKAEELFERNISTYTTFATNIFSKAVVQDDYIKNHNKASDVLQYSDKEFSDSKVLRNDAMKRILQYWGGQSRWNNTLNKINVDTLCIDIKEHLSNIRNSSVHYTSKVSLSGDKNESIVYMLFKKDFAEIRNIFASKYYSNNVWMFYSIEKINGLMEYLYGDNSTVIDAQIPAYNNIIKRKNIADVIEKIIKKNSYKTINELELIKKYRACLYFILKEIYYNRFIKQENLKEQFIQFVDNDNNLLDDNKNAVESFRRRIHDIDNSLMSFGEMCQFIMTDYNMQNQGNKSIKSKDRQNEDKKKGIDGSYKHFPLLLYHVIKELFLKYIKTDEKIVFIREPANIGSVKTQDEFETHISTLGLYKTLKEKVDSNMSLLDWYTLSHFLMPKQLNYLIGDIKNYIQYLRNIDKRAESVGNNKAYDIDGKINNYYDIVYVLDFSLQYIGRISNEITDYFADEDEYALFMSQFVDFSSDNIVGLKTFCNEKTSNGKHTIGLYCDGANPIMNRNIAYAKMYSNDKILSRTYSKVTIKEIERYYRIQDDLKNVFENGVCKNKDQQKELCDFQKIKNHIELTEISIYTNILNDFMSQFISWSYLRERDLMYFQLGMHYLRLYYGTNELETKYNKLVGESVNIEKGALLYQIAAMYTYKLPIYKVDKNGSAVLAEKQGGTGASVTSFVTEYCKENMRDAIIYEKGLELFEDVKQHKKWSDFRNDIAHMRYISDRDKSIMDIISEIYGGFFTYDIKLKKSIPVIFKNILMRYAVDANLNFLHKENRKLKDTLINIRADKGLVSDKYTYKIGEKDTVDIEVRNDKFLLQLRKLLEYKIRVNGNVL

SEQ ID NO: 2390 - protein, 352 aa, unidentified
  REGION 1..352: note = Category: MG81 effectors
  REGION 1..352: note = Description: MG81-673 effector
  source 1..352: note = uncultivated organism sequence
MKHTKTLQVRVRDKHTQLLRQMARQVNFVWNYLNELSHRSIRERGVFLSAYDLDRYTQGASKELGLHSQTLQEVSREYATRRRQFKKARLSWRKSIGVRRSLGWIPFKSGAASWKNGQVFHNGRCFKVWDSYGLGQYRLRSGSFSEDARGRWYFNVVVELETQLSTGQGAVGIDLGLKDVATCSDGQRLENGRFYRDLEPKLASAQRAGKKARVRAIHAKIANRRKDALHKFSRSLVERCNTIIVGDVSPQKLVRTRMAKSVLDAGWGQLKTMLAYKCAHAGIVFRVVNEAYTTQTCSCCGALPASRPRGIAGLGIREWICECGVTHDRDVNAARNILALGHERPGEGIPGV

SEQ ID NO: 2391 - protein, 512 aa, unidentified
  REGION 1..512: note = Category: MG81 effectors
  REGION 1..512: note = Description: MG81-674 effector
  source 1..512: note = uncultivated organism sequence
MPTKQKEDSNRCVLTLPLLTEPWQEHIIEKRFKIIEHLKNQLISIELRKLKKLQRTKAYKNLIKQIESVPKSERTALYKERNKMLKDAGFSQYTFMDDMAGKKSLMQKHFESHINVQIAHKAAIDVWSSFEKFLFGTGQIVHYQKRGTLSSVASKSPKTGMFYYSDENIFKWSGGGTKPKGGIILCLRVASVKTNYEKEMVANNEIKYYRVVRKWMKTKYKYYLQITFAGKPADKHREISTGRVGIDIGTQTIAIASDKSVKLLELADKVNKNHIKKCELQRKLDRSRRYTNPDNFNPDGTVKRGTKGHKLKWNKSKHYIEIAGKIRELERKNADIRRYQHTCLANDILAMGNQIYIEPMNYKGLQKRAKETQVDEKGRYKKKKRFGKSLANKAPAMFVTILKTKAEQHGGEVYEVDIMSYRASQCDHTTGEYTKHGLNDRWRILGNGDKVQRDLYSAFLIKNSNKTHDEIDLDKCSKTYDNFKKLHDTEIENIRNEVKLRERKNISSYGIA

SEQ ID NO: 2392 - protein, 512 aa, unidentified
  REGION 1..512: note = Category: MG81 effectors
  REGION 1..512: note = Description: MG81-675 effector
  source 1..512: note = uncultivated organism sequence
MPTKQKEDSNRCVLTLPLLTEPWQEHIIEKRFKIIEHLKNQLISIELRKLKKLQRTKAYKNLIKQIESVPKSERTALYKERNKMLKDAGFSQYTFMDDMAGKKSLMQKHFESHINVQIAHKAAIDVWSSFEKFLFGTGQIVHYQKRGTLSSVASKSPKTGMFYYSDENIFKWSGGGTKPKGGIILCLRVASVKTNYEKEMVANNEIKYYRVVRKWMKTKYKYYLQITFAGKPADKHREISTGRVGIDIGTQTIAIASDKSVKLLELADKVNKNHIKKCELQRKLDRSRRYTNPDNFNPDGTVKRGTKGHKLKWNKSKHYIEIAGKIRELERKNADIRKYQHTCLANDILAMGNQIYIEPMNYKGLQKRAKETQVDEKGRYKKKKRFGKSLANKAPAMFVTILKTKAEQHGGEVYEVDIMSYRASQCDHTTGEYTKHGLNDRWRILGNGDKVQRDLYSAFLIKNSNKTHDEIDLDKCSKTYDNFKKLHDKEIENIRNEVILRKRRNISSYGIA

SEQ ID NO: 2393 - protein, 352 aa, unidentified
  REGION 1..352: note = Category: MG81 effectors
  REGION 1..352: note = Description: MG81-676 effector
  source 1..352: note = uncultivated organism sequence
MKTLKLRIKDKNLKVLDQLASEVNFVWNYVNDLGFKYLKRTGEFLSSYDIDKYTKGASKECGLHSQTIQAISAELVTRRKQFKKAKLKWRVSNKKSARRSLGWIPFKKVAIKYADGYVQYGKHQFKLWDSYGLSKYNVKTGSFVEDSRGRWYVCLVVDNATTIKSKGKTSIGIDLGLKDLATCSDGLKLKAPKIYREYEQKLGIAQRAKNKNRVRSVHAKIKNIRQNMLHQFTRKLVNEHAMIIVGNVNAKALAQTKLAKSVLDASWTTLRTMLKYKCENARVLFEEVNEAYTTQTCSCCGSRLSSPKGRTGLRIREWQCMECGTLHDRDINSALNILALGHERLAVGIPVL

SEQ ID NO: 2394 - protein, 513 aa, unidentified
  REGION 1..513: note = Category: MG81 effectors
  REGION 1..513: note = Description: MG81-677 effector
  source 1..513: note = uncultivated organism sequence
MPYGQKSKTDTFILTLPLITNSHDEAVLYSNFEKYCKAYNWLVQKTTEMWHQVRKTRRYRELVSAIANTAPKSKERKALYKKRTELLESYGFTSVLFEKKLKAYAKYYHLHSAISQKIAARVWDAWYKFFYKNGKSVHYKKLDDFVSFAAKTNGTGIQFLDDNGLYIKFRGRCIPVKLRKGNTAWYQQEALKRKVKFCIIKREMIRGRWRYFVQLALDGYPPIKCDGNGVAKHPVEPGHIGIDIGTQTIAFSGKDVCDLRVLAPSAIAEARNGLTKEIARIMRQMDRSRRAMNPQYFNENGTVKRLKRKNGHKQIRHWNYSKNYYRLLHRLRDLNRKLAAVRKTEHYILANEMLTYGNEFYVEDMNYKALQKRSKKTKINPKTGRAYTKKRFGKSIGRCAPALFITILGQKASRYGGSVIKVSTFETKASQFDHTDDSYTKKKLSQRFAKLSNGTVVQRDMYSAFLLTHLDESLQGYDKEAIDKDFQQFMKLHNETKERLQNSHEWLPASVGF

SEQ ID NO: 2395 - protein, 386 aa, unidentified
  REGION 1..386: note = Category: MG81 effectors
  REGION 1..386: note = Description: MG81-678 effector
  source 1..386: note = uncultivated organism sequence
MAGDIPPNNDDQLNINTLYVHTTMNIQIKTLSVRIKDKHAAVLRQMAFEVNQIFNLANEITSAAYSNAGFFGAQKPQWLSAFDVQKPLLKERKERGYTIPSHTVQEIAAIHGKARKQFKRSRLRWRVSGGSRRSLGWVPFKIGSAVWKNGAVRFAGRIFNVWDSYGLGGFKFRAGSFSEDSRGRWYFNVCVEVETVPSTATSAVGIDLGLKDYATPSEGDPLIAGRFYRDLEPALGKAQRANKKARVRAIHAKIKNRRKDALHKYSTALVSSHAAIFVGDASSKKLVKTKMAKSILDAGWFMLKTQLEYKAIARSVVFEVVNESYSTQACSCCGAISSNSPKGRAGLRIREWTCCECGTTHDRDVNAAKNILAAGHRRLAVGIPFL

SEQ ID NO: 2396 - protein, 578 aa, unidentified
  REGION 1..578: note = Category: MG81 effectors
  REGION 1..578: note = Description: MG81-679 effector
  source 1..578: note = uncultivated organism sequence
MAFGRKESTPSFVLTLPLDINLNEQNYLYKEFKKCGTIYNQLVSATTKMWHQLHKTHEYRALMAAITKAAPDSKELKALLNQRQNMIHQFGFSEGAFHKMVAPYAKHFAINSHVAQKIASAVWTAWKNFFFSKGKVVHYKKLENVTSISGNNNATDIALRPANLTTSIIKSTKDKKKKAIEQRYYKAYGQPDPKDDKNVILPDAVIPQMEVDIVAAVAKVKLSIGEGSLRIVYSDHEFPVVVRNPNTQTGRYQQEALKCGVKYCRITRKWVRNKWKYYAQLVLEGYPPVKCDSNGVMRHPVNQGRVGLDIGTQALAISGSDICDLRVLAPSARAQAKSLVNEIACTMRAMDRSRRATNPKYYNPDGTIKRLKRKHGQKQKRDWKYSKHYYRLRAKLRDLNRRLADIRKMEHNALANELLQHGNEFIVEDMDYKALQKRSKKTKINAKTGRAHTKKRFGKSLSRCAPAKFITILTNKAVRNGGNVIKVDTFETKASQFDHTDESYTKKKLSERMAHLSSGEVVQRDLYSAFLLEHIDTETLKYDIEALKAAFPAFLKMHENTKERLQEAESYLPASVGF

SEQ ID NO: 2397 - protein, 578 aa, unidentified
  REGION 1..578: note = Category: MG81 effectors
  REGION 1..578: note = Description: MG81-680 effector
  source 1..578: note = uncultivated organism sequence
MAFGSKNSTPSFVLTLPLDISLNEQNYLYKEFKKCGVIYNQLVSATTKMWHQLRKTRKYRELMAAIAKAVPDSDEQKTLFKQREKMLKEYRFSENAFHKLVVPYAKHFAIHSHVAQKVASAVWTAWEGFFFSKGKAVHYKKLEDVTSISGKNNATGIVLRPANLTTSNIESAKRKAQKAVEKRYDDMYGRPDPKDDKKVVLPDEVKPQMEAEIAAAIAKIKPTIGEGNLRIVYGKHEFPVVLRNPKTQTGKYQQEALKCGVKYCRITRKWVKTKWKYYAQFILEGYPPTKCDSNGVMKHPVNQGRIGLDIGTQTLAISGKDICDLRVLAPSARAQARGLTNEIARTTRAMNRSRRATNPQYFNSDGTIKRLKRKHGHKQRRDWKYSKRYFRLKAKLRDLNRRLGDIRKMEHNILANELLEHGNEFVVEDMNYKALQKRSKETKVNPKTGRAHTKKRFGKSLSRCTPAMFISILNKKANRYGGSVIKVDTFETKASQFDHTDESYTKKRLSERMAHLSSGEVVQRDLYSAFLLEYIDTESLEYNTKALNSAFPAFLKMHENTKERLQEAGSYLPASVGF

SEQ ID NO: 2398 - protein, 536 aa, unidentified
  REGION 1..536: note = Category: MG81 effectors
  REGION 1..536: note = Description: MG81-681 effector
  source 1..536: note = uncultivated organism sequence
MDADEYKKLLKKFHKLSDRHILVAEADMSYPDVQKVVNLSDRIRKAGNELVSLMKKNYEQLMRTKKYRKLLQLYGSTEDKKKRKTYAGQLNEMQEQYNLTKESCRTLMIPIGKKYGIDAIFALTKAEDVWHGVEKCLYGNGKTLHFSKYGDLPCIRAKQINRGIPMSVKNDELKFKLGKLVFGIQVKDRFQTDEVNAVLDYLASPETTDRKAVQTLLEEACCISTYRPCYATLVPKFIRGKYRVYLHLTIEGRAKPKYDRFGNPRHKYGNGIVGADIGTQTVAYTSDTETGLKNLSERGNSIQTSERLERLYYRAMNRSRRATNPENYNADGTIKKGKKKWTYSRHYKKLKAKHAELCRINATNRQLAINEDVNHLRCLGDTFVTEPKNAARLMKRAKETTVNNKGKINRKKRFGKSVKNRCPGGFQAAVENKFKTSGGTYIEVPNNYRASQYDHTADDYIKKKLSDRMYKLADGTLVQRDWYSSFLLYCYNYRTNGIDKKKCAAEFKKCYSMEKDFIEWIKTNKIKVLNSGIKIA

SEQ ID NO: 2399 - protein, 349 aa, unidentified
  REGION 1..349: note = Category: MG81 effectors
  REGION 1..349: note = Description: MG81-682 effector
  source 1..349: note = uncultivated organism sequence
MLLTYRYRLKDGSRARKRELRRMARAVNRVWNYCNEAQLHALKHNKRWPRAFDLNNLVAGSSKLLGLQSHTIQAVCEKYAASREAKRKAKLRWRGKRSLGWVPFKASGIKQDGAGWVYLKRRFPCWLHRALPDGGAIKYGSFSEDACGNWFINIVVELPDVEQSDDGADIGIDLGLKDLAALSTGEKIENPRHLSKLAAKLARAQRANKKKLAARTHRKIARARADHLHKASRRITDAARVIVVGDVSSTKLVKTDFARSVLDAGWSSFKEMLRYKATARGASFVCAAEHGTSRTCSCCGDTASGPKGIAGIAVREWTCSNCGASHDRDVNAARNILRVGLNTLKGAPL

SEQ ID NO: 2400 - protein, 562 aa, unidentified
  REGION 1..562: note = Category: MG81 effectors
  REGION 1..562: note = Description: MG81-683 effector
  source 1..562: note = uncultivated organism sequence
MSRWNKDIEVGERCVLTLPLNCHPRDTRFLDQVFQIENKLKNQLIEWYKTQLNEMTRTRLWREASQALADLHTEYGPDMKLLAELDEKAKKKPLSKTKEAKRVQLRQKAKEFQAKQKPLYETRNGMIRKYEFSRGDFEKRMAKYRRSYTDFVGSMVAQRLADDVWDMFQSYLYGKGKAIRFSGINKFLTIEGKNNSANIVFDRKAMKVFIGQGRHKTGIRVKRSRKDPCGYEAEALSREICYCRITRKAYPEGWRYFLQLVLKGAPPVKAKPDTGELLHPMGEGRVGMDIGPQTLAYCGEDVLDLVELAPGAQNLQEEIRRINRAMDRSRRATNPGMFDKAGQIIPGNRLPRELLDSHGKRKWVKSKQYREMERHRRYLYRKQADLRKAKHQQLANKLLAAGDRFYVEDMSWRALSRRSKQARKNKKGKNLSKKRFGKSIANKSPGAFLSILEKKVLAQGGSFYRINIWKARASQFHHMTGQYIKKKLSQRVDILEDGSKVQRDLYSAFLIMHSNKALDGFLVSSCNRDYPKFLQMHNKAMAALAASDKPLPSSMGVRRKAA

SEQ ID NO: 2401 - protein, 512 aa, unidentified
  REGION 1..512: note = Category: MG81 effectors
  REGION 1..512: note = Description: MG81-684 effector
  source 1..512: note = uncultivated organism sequence
MPTKQKEDSNRCVLTLPLLTEPWQEHIIEKRFKIIEHLKNQLISIELRKLKNLQRTKAYKNLIKQIESVPKSERTALYKERNKMLKDAGFSQYTFMDDMAGKKSLTQKHFESHINVQIAHKAAIDVWSSFEKFLFGSGQMIHYQKRGTLSSIASKSPKTGMFYYSDENIFKWSGGGTKPKGGIILCLRVASVKTNYEKEMVANNEIKYYRVVRKWMKTKYKYYLQITFAGKPADKHREISTGRVGIDIGTQTIAIASDKSVKLLELADKVNKNHIKKCELQRKLDRSRRYTNPDNFNPDGTVKRGKKGHKLKWNKSKHYIEIAGKIRELERKNADIRKYQHTCLANDILAMGNQIYIEPMNYKGLQKRAKETQVDEKGRYKKKKRFGKSLANKAPAMFVTILKTKAEQHGGEVYEVDIMSYRASQCDHTTGEYTKHGLNDRWRILGNGDKVQRDLYSAFLIKNSNKTHDEIDLDKCSKTYDSFKKLHDKEIENIRNEAKLRERKNISSYGIA

SEQ ID NO: 2402 - protein, 537 aa, unidentified
  REGION 1..537: note = Category: MG81 effectors
  REGION 1..537: note = Description: MG81-685 effector
  source 1..537: note = uncultivated organism sequence
MISNEEYKKLLKQFHKLSDRHILVVETDMSSSGIQKVIKLSDKIRKAGNELVSLMKKNYDQLMRTKKYRKLLKLYGSTEDKKKRKDLAEQLNKMQKQYNVTWDYCRTAMIPIGKKYGIDAVFALTKAEDIWRGIEKCLYDNGNTIHFSKYGDLPCIRAKQINRGIPMSVKDNKLQFKLGKSAFGIKINDVFQTDEVNAILNYLAEPEIVDNKAIQTLLDEAYCIDTYRPCYATLVPKLIRGKYRVYLHLTIEGKAKPKYDRFGNPRHRFGRGIIGADIGTQTVAYTSDTEIGLKNLAERGNSIQKSERLERLYYRAMDRSRRATNPQNYNKDGTVKKGRKSWKYSNHYKKLKAKHSELCRINAINRQLAINEDANHLRSLGDVFITESKNASKLMKRAKETTVNSKGKFNKKKRFGKSIKNRCPSGFQTTVEKKFKVSGGTYIEVPNNYRASQYDHTIDDYIKKKLSDRMYNLADGTLVQRDWYSSFLLYCYNYKTETIDKDKCFLKFEDCYNKEKALIEWIKANKIKILNSGIKVA

SEQ ID NO: 2403 - protein, 512 aa, unidentified
  REGION 1..512: note = Category: MG81 effectors
  REGION 1..512: note = Description: MG81-686 effector
  source 1..512: note = uncultivated organism sequence
MPTKQKEDSNRCVLTLPLLTEPWQEHIIEKRFKIIEHLKNQLISIELRKLKNLQRTKAYKNLIKQIESVPKSERTVLYKERNKMLKDAGFSQYTFMDDMAGKKSLMQKHFESHINVQIAHKAAIDVWSSFEKFLFGTGQIVHYQKRGTLSSIASKSPKTGMFYYSDENIFKWSGGGTKPKGGIILCLRVASVKTNYEKEMVANNEIKYYRVVRKWMKTKYKYYLQITFAGKPADKHREISTGRVGIDIGTQTIAIASDKSVKLLELADKVNKNHIKKCELQRKLDRSRRYTNPDNFNPDGTVKRGTKGYKLKWNKSKHYIEIAGKIRELERKNADIRKYQHTCLANDILAMGNQIYIEPMNYKGLQKRAKETQVDEKGRYKKKKRFGKSLANKAPAMFVTILKTKAEQHGGEVYEVDIMSYRASQCDHTTGEYTKHGLNDRWRILGNGDKVQRDLYSAFLIKNSNKTHDEIDLDKCSKTYDNFKKLHDKEIENIRNEVILRKRRNISSYGIA

SEQ ID NO: 2404 - protein, 347 aa, unidentified
  REGION 1..347: note = Category: MG81 effectors
  REGION 1..347: note = Description: MG81-687 effector
  source 1..347: note = uncultivated organism sequence
MIQYQLKLRMCKSQEQKCEQFLYHLSSVWNWAVRKIELNAKDHIYFSKMEFQNFLSNHSEKMGIPSHTLQGVICTAHDAWKRCFKKIGGKPKLKGMRNKMSSIPFPDPIKAPKGNRINLPALGSVRFHKMELPDGKIKCGRIVKRTSGWYLCLFIDAQPKVIERTGYGVIGVDGGFKDLLTLSTGEKISHPRELEVAAERLAQAQRGHDTKLAARIQEKIANRRKDRNHKLSRRLIAENVVIKFSADNHKAVARRFGKSVASSGHSQLQRMLAYKSPQSGTQYFEIAPKDSTKTCWVCGEPTGPTGLAGLSVRQWRCTTCGTFHDRDQNAAVNTLIAAAGCAVEVCI

SEQ ID NO: 2405 - protein, 369 aa, unidentified
  REGION 1..369: note = Category: MG81 effectors
  REGION 1..369: note = Description: MG81-688 effector
  source 1..369: note = uncultivated organism sequence
MTEDIVDQEGESGVRQCGARSALTVMRFRLRDKHARELSSQGRAVNFVWNYCNETQQKTARAGRKWLTAVDLQRLTAGASKDLDLHAHTIQKVCQQYDRSRKQHRKPWLRFRGRKSLGWVPFNQGHVTVVAPGKLKFRGVIYETMHWRDLPDGAVIRAGSFNQDSRGRWYINLPIEMPAEAFAKSGGSIVGIDLGLKDLATLSTGEKIENPRHLAKHAERHAKAQRAGKTKLARSIAAKVANCRKDYLHKASARIALAHGTIFVGNVSSERLARTRMAKSVLDAGWSTLRTQLSYKALRHGGKMIEVDERNTSRSCSVCGADSGPKGIAEIGIRRWECEVCGESHDRDVNAALNIVRVGLDTLVEGASL

SEQ ID NO: 2406 - protein, 362 aa, unidentified
  REGION 1..362: note = Category: MG81 effectors
  REGION 1..362: note = Description: MG81-689 effector
  source 1..362: note = uncultivated organism sequence
MINYQLKLKLTKYQEQQLESWLPILTSIWNWTIRKIELDAKDNIYYNSKFDFVNLLVNHSEKLGVSSHTMMCTTMTAYNLYQQYIKKKCGKPKFKGQRNKLNSILFPDIIKQPQNNKIQLRVIGKIKYHKQQIPEGNIKCVRIIKKVSGWYAVLTIDTKPKKISIISNNKVGIDPGFKHLLTLSNGDKIEHPREFEINAERLAQAQRGHNKKLAAIINEKIANQRKNRNHKLSRKLVSENELIVFSKDNHKNVAKKFGKSVSSSGHYQLQKMLEYKCRTDGRQYIEVDCKFSTMTCSTCNARTGPTGWEGLKVRNWECTECGTLHDRDINAAINTLNSGLGISHENTVKTEIQKTSNEWGNI

SEQ ID NO: 2407 - protein, 537 aa, unidentified
  REGION 1..537: note = Category: MG81 effectors
  REGION 1..537: note = Description: MG81-690 effector
  source 1..537: note = uncultivated organism sequence
MISDEEYKKLLKQFHKLSDRHILVVETDMPYSDVLKVMILSDKIRKAGNELVSFMRKNYDQLIRTKKYRKLLKLYGSTKDKKKRKDLADQLNEMQKAYNVTWDHCRRSMIPIGRKYGIDAVFALTKAEDVWRGIEKCLYGNGKAIHFSKYGELPCIRAKQINRGIPISVKDDRLQFKLGKTAFGIQVNDRFQQDEADAVLTYLAEPEIVDNKAVNTLIEDAYYIDTYRPCYATLVIKMIRGKYRVYVHLTIEGKTKLKYDKHGNPRHKYGKGVIGADIGTQTVAYTSDTEVGLKNLSERGNSIQTSERKERLLYRAMDRSRRAANPQNYNEDGTVKKGRKTWKYSNHYKKLKAKHSELCRINAVNRQLAINEDANHLRSLGDTFVTEPKNASKLMKRAKETAVNDKGRFNKKKRFGKSIKNRCPSGFQTTVEKKFKTTGGTYIEVPNNYRASQYDHTVDDYIKKKLSDRLYKLQDGTEVQRDWYSSFLLYCYDYKIQKIDKNKCITQFDNCYKKEKALITWIKAHKIKVLNSGIKIA

SEQ ID NO: 2408 - protein, 578 aa, unidentified
  REGION 1..578: note = Category: MG81 effectors
  REGION 1..578: note = Description: MG81-691 effector
  source 1..578: note = uncultivated organism sequence
MAFGSKNSTPSFVLTLPMVIGFNEQDYLNKEFKKCGVIYNQLVNATTKMWHQLRKTRKYRELMAAIAKAAPDSDEQKALFKQREKMLKEYRFSEDAFHAMVVPYAKHYAINSHVAQSIATAVWTAWSSFFFDKGKEVHYKKLEYVSSISGKNNATGIMLRPANHTTNVINSAKTKAKNSIEKKYFAAYRKPDAKEGEEVVLPDEVKAQMEKEIAAATAKVKTSIGKGKLHITYGDYTFPVTLRNPDTQTGWYQQEALKCGVKYCRIIRKWVSTKWKYYAQIVLEGYPPIKCDNNGVAKHPVKQGRVGIDIGTQTIAFSGKDVCDLRVLAPAARAQAKSLVNEIASTLRAMDRSRRATNPKYYNPDGTIKRLKRQHGQKQKRKWKYSKRYYRLRAKLRNLYRKLADIRKMEHNILANELLTHGNEFVIEDMNYKALQKRSKETKINSKTGRAHTKKRFGKSLSRCAPAMFISILGKKANRYGGSVIKVSTFETKASQFDHTDESYTKKKLSERMARLRNGDIVQRDLYSAFLLEHIDTESLQYNMETLNSAFPAFLEMHENTKRRLQAVGSSLPASIGF

SEQ ID NO: 2409 - protein, 353 aa, unidentified
  REGION 1..353: note = Category: MG81 effectors
  REGION 1..353: note = Description: MG81-692 effector
  source 1..353: note = uncultivated organism sequence
MKTLKLRIKDKHCKVLDQLASEVNFVWNYVNDLGFRHLKRKGEFLSAFDIAKYTKGTSKECNLHSQTIQAVTEELVTRRKQFKKAKLKWRVSNKKSARRSLGWIPFKKVAMKYANGYVQYGKHQFKLWDSYGLSKYTLKTGSFVEDSRGRWYVCLVVESPKQDKSTATKAIGIDLGLKDIATCSDGTVISNPKFYRKYEQKLGIAQRARNKKRVRALHAKIANSRKDHLHKASTKLVNENALIIVGDLSAKKLVKTKMAKSVLDTGFSALKTMLKYKCENAGVLFEEVQEAYTTQICSCCGEITSSSPKGRTDLGIREWECMSCGTAHDRDINSALNILALGHKRLAVGITLF

SEQ ID NO: 2410 - protein, 913 aa, unidentified
  REGION 1..913: note = Category: MG81 effectors
  REGION 1..913: note = Description: MG81-693 effector
  source 1..913: note = uncultivated organism sequence
MSYLAAKYIDLGKGVYHFTMKDKLDMLNKNEAVTDLRFGIVSEKYEKGITSFDYERIKAEEELDRNIAAYVTFAADIFAKSVIKSDYRTKKDNNSDVLQYSDKEFRNSEVIRDNAEKNILQYWGGYSRWGTENSKLPENNKVSDFGKLDVSDLCIDIKKHLAGIRNSSVHYTTKIKNESAADGSNVKILFEKDLADINIIYADKYYSNNVWMFYSLEDINKLIAFLYKEKRVIRQVQIPSFSRILKRKAMQDVINEIFKDDFDENIVNPELKEKYRNSLYFMLKEIYYNAFIIQPELKEKFKDKIKTMKSELYNKLKTIDKKEYKALYCMLSNEESALKNFADRIYSVDGDNVSFADICKILMTDYNMQNQEKKNIESMEQKKKNKGKDENYKHFPLLLHKVLKELFIEYLKQTHELEFLRNNICIKSDVTMESFESQIKGVEIYKDLKEKIDKNNSLLDWYVIAHFLMPKQLNHLIGNIKNYIQFATNIDKRAESVKNLTESGMVKRIQYYDDIVRTLEFSAQYIGKISNNINDYFNSEDEYVSFLSKYVGFINDKSEDVLTELKDFCREKINNGSQIIGIYYGGDNVIINRNVIYAQMYSNAEVFSNIYKKVTKNDIINYYEKQNDLKDVFKSGVCQNEDEQRSLCEFQQLKNRIELTELSTYADMVNDFMAQFVEWAYLRERDLMYCQLGIHYIRLFYSDNVLDEKYHKLSDNVIDIEEGALLYQIVAMYDYELRIFETDNSGNAKRIGQGGPGKSIPVFLKKYCNVTDVYECGLELFEDINQHEHIIRFRNDIAHMRYMSNQAMNIMSIVSNIYKSFFVYDTKLKKSISLVFKNILMRYGVIADLVFSYNNKNQSIKDDMDINIINIKNLKSDKYVYKIVNEDIVKQVEIEIRNQVFLEQLHNLLYFSR

SEQ ID NO: 2411 - protein, 392 aa, unidentified
  REGION 1..392: note = Category: MG81 effectors
  REGION 1..392: note = Description: MG81-694 effector
  source 1..392: note = uncultivated organism sequence
MSSEPPPEVDGANCIRTLRLKLKPEAYAWLNAAAVEINRVWNFANETSAKAARPFAGPPKWLSAYDLDKLTAGATEYFERIGSASIQRVNAEFATRRKQVKKTKLRWRSSRGSRRALGWLPFKAVQLKRKGKSLRFSGKAFRVFEQQRLLGVSWKSGCFTQDAVGDWWLNLAVEVRLEPPVAQNEEVGLDLGLKDTVATSDGEKLEAGHFYRNIEQQIAQAQRRGHKRQAKRLHRRAARRRKDALHKFSRMIVNRYQRIIVGDVSSARLVKTRMAKSVLDAGWGMLKAQLQYKSQQASRSVFIVSERNTTRACSNCRALTGPTGLDMLAVRTWVCSGCGGTHDRDVNAAKNIRFAVRCSPSLSGNESSPSHAPPSQAPCLREARNSALTAVA

SEQ ID NO: 2412 - protein, 556 aa, unidentified
  REGION 1..556: note = Category: MG81 effectors
  REGION 1..556: note = Description: MG81-695 effector
  source 1..556: note = uncultivated organism sequence
MAFGSKNSTPSFVLTLPMVIGLNEQDYLNKEFKKCGIIYNQLVNATTKMWHQLRKALFKQREKMLKEYRFSEDAFHAMVVPYAKHYAINSHVAQSIATAVWTAWSSFFFDKGKGVHYKKLEYVSSISGKNNATGIMLRPANHTTSVINSAKTKAKNSIEKKYFAAYRKPDAKEGEEVVLPDEVKAQMEKEIAAATAKVKTSIGKGKLHITYGDYTFPVTLRNPDTQTGWYQQEALKCGVKYCRIIRKWVSTKWKYYAQIVLEGYPPIKCDNNGVAKHPVKQGRVGIDIGTQTIAFSGKDVCELRVLAPSARAQAKNLVNEIASTHRAMDRSRRATNPKYYNPDGTIKRLKRQHGQKQKRKWKYSKRYYRLRAKLRNLYRKLADIRKMEHNILANELLVHGNEFIVEDMNYKALQKRSKETKINPKTGRAHTKKRFGKSLSRCAPAMFISILGKKANRYGGSVIKVSTFETKASQFDHTDESYTKKKLSERMARLRSGDIVQRDLYSAFLLEHIDTESLQYNMETLNSAFPAFLEMHENTKRRLQAVGSSLPASIGF

SEQ ID NO: 2413 - protein, 512 aa, unidentified
  REGION 1..512: note = Category: MG81 effectors
  REGION 1..512: note = Description: MG81-696 effector
  source 1..512: note = uncultivated organism sequence
MPTKQKEGGNRCVLTLPLLTEPWQEHIIEKRFKIIEHLKNQLISIELRKLKNLQRTKAYKNLIKQIESVPKSERTALYKEKNKMLKDAGFSQYTFMDDMAGKKSLMQKHFESHINVQIAHKAAIDVWSSFEKFLFGTGQIVHYQKRGTLSSVASKSPKTGMFYYSDENIFKWSGGGTKPKGGIILCLRVASVKTNYEKEMVANNEIKYYRVVRKWMKTKYKYYLQITFAGKPADKHREISTGRVGIDIGTQTIAIASDKSVKLLELADKVNKNHIKKCELQRKLDRSRRYTNPDNFNPDGTVKRGTKGHKLKWNKSKHYLEIAGKIRELERKNADIRKYQHTCLANDILAMGNQIYIEPMNYKGLQKRAKETQVDEKGRYKKKKRFGKSLANKAPAMFVTILKTKAEQHGGEVYEVDIMSYRASQCDHTTGEYTKHGLNDRWRILGNGDKVQRDLYSAFLIKNSNKTHDEIDLDKCSKTYDSFKKLHDKEIENIRNEVILRKRRNISSYGIA

SEQ ID NO: 2414 - protein, 512 aa, unidentified
  REGION 1..512: note = Category: MG81 effectors
  REGION 1..512: note = Description: MG81-697 effector
  source 1..512: note = uncultivated organism sequence
MKKSSTDTCCLTLPLKLEKWQEDRLAKRFEIARQLYNTLVHAELKRLVQIKRTAEYLENEQKIRALDRNNPADRAKLQELYKEQRKSLKTAGFTDYSFTTDMGKYYKHFRDNIGSSVAVHGIAPQVWAAFDKVLFKKGGKKVHYKKPGEVNSVQGYSRTGKSGGTEIMFRGPYIEWKGLKLPLKVSPDNAYETDMLQRRVKLVRLVRRPGKRRDRWYAQLVLEGKPAIKADPVTGKAVRPIGSGPVGLDIGPQTLAYSAAGVAGLVELADRVQNIEQEKRCLQRKMDRSRRAANPDNYAEDGTIRRGVKLTHNKSKRYRRSQQELKYLQHRQAEMRKLQHIQLANHLLSLGDHFYVEKMEWSSLTHRAKKTVISEKTGKPRSKKRFGKSIANKAPAMLIEILRQKCKSLGLPNVVEINPADIKASQYNHLTGEYVKKSLSRRWNEMQDGEHLQRDLYSAFLLQHYDSMSKALDLDSLARDYPAFVQYHHREIERLHALPKTPSSMGIRRSIA

SEQ ID NO: 2415 - protein, 512 aa, unidentified
  REGION 1..512: note = Category: MG81 effectors
  REGION 1..512: note = Description: MG81-698 effector
  source 1..512: note = uncultivated organism sequence
MKKCTTDTCCLTLPLKLEKWQEDRLAKRFEIARQIYNTLVRAEFKKLNELERTPEYKKILEQIHSLDWKDSGNRQRLNDLYRERNQILKNAKFTEYGFKSDMKFYYKHFSDNIGSCVAVHGIAPQVWAAFERYLFKPEGKKVHFKRFGDVHSLRGYSKAGESGGAEITFCGTHIRWKNLELPIKLSPDNAYETEMLSRRVKYVRILRKPGKSKDRWYVQLSLEGKPAIKYDRNAGEIKHPVAHGAVGLDIGPQTLAYSAETTADLVELADQVQNIEQEKRRLQRKMDRSRRSTNPGNYNTDGTIRRGVKLTRNKSKAYCKLQRQLAYLQHTQAETRKRQHTELANYLLSLGDCFYVEEMKWSSLAHRAKETAVSEKTGRFKQKKRFGKSIANKAPSTLIGILQQKCESLGLPGIIYVPLSAKASQYNHLTGEYTPKPLSQRWNTMPDAQRVQRDLYSAFLLQHFDSQAGIYNLQSLQRDYPQFLQYHDQSIRRLSEMPKTLSSMGIRKSIRA

SEQ ID NO: 2416 - protein, 357 aa, unidentified
  REGION 1..357: note = Category: MG81 effectors
  REGION 1..357: note = Description: MG81-699 effector
  source 1..357: note = uncultivated organism sequence
MIKTLRVRVKDKHAALLRCMAYEVNQIFNKANAITAERACVCSDFGPCKPSYPTAFDLDKSVKKEPDYHIGSATVQEILAYHAKARKQFKRSKLRWRCSSGPRRSLGWIPFRVGQSKYKAGQIVFARHHFKIWDSYGLSGVEFKSGSFSEDARGRWYFNAAVEVAVEPFNGGGDIGIDLGLKDVATCSDGTKLPAERFYRGMENKLKIAQRTNKKARVRAIHAKIKNRRKDMLHKFTTELVKKNAAIFVGDVSSTKLAKTKMAKSIYDASWGLLKTMLSYKAIGYSAWFEDINESYSTQLCSACGEIPASSPKGRAGLGIREWTCSCCGAVHDRDVNAALNILAAGRCRLAGGIPAL

SEQ ID NO: 2417 - protein, 358 aa, unidentified
  REGION 1..358: note = Category: MG81 effectors
  REGION 1..358: note = Description: MG81-700 effector
  source 1..358: note = uncultivated organism sequence
MQTVTYKYRVKDRSARKTLARHAKACNQVWNYCNAFQRDIEARYRAGAPKRRWPSAFDLAKLCKGVGKELGIHQQTVGTVCDQFAKSRDKAKHSLRFRPSFGVKRALGWIPFQKQSRQIEGNSIWYLGKRYRFFSCKRRPLPDSAKGGAFVEDALGRWYVCFHVEVTERHPHGNGAIGIDLGLKSLAVMSDGQKIEAPRHYRQLEGKLAIAQRAHNKQRVRRIHAKIKNTRKDFLHKLSTTLADQNAIIAVGDVNSKQLAKTRMAKSVFDAGWSTFRTMLKYKSAGYVEVDEKFTTQTCSHCGALPPERPKGIAGLGIRAWECSSCGESHDRDVNAAKNILVLALSAERPVVESRIAA

SEQ ID NO: 2418 - protein, 550 aa, unidentified
  REGION 1..550: note = Category: MG81 effectors
  REGION 1..550: note = Description: MG81-701 effector
  source 1..550: note = uncultivated organism sequence
MGWKSKGRGGTLVDNEEKKEDGATCCLTLPLKLEKWQSDHLEKRFEIARQLYNTLVHAELKKKCQVERMPEYQEIMKMIDTASNQKEKWALEKKRKAFLEENGFSRNAFKADMEKYYKHFNDNIGANVALHGITAQVWIAFDKVFVDNYKQKGKVHFKKPGELCSMQGYSQKKSGGKEIMFREDRIIWNQQGNRDRKKVKREFLLKLSPDNPYEAEMLKRHVKFVRILRKDGKTKPHWYAQLVLEGKPAVKRDPASGAPKHPIGHGVVGIDIGTRTLAYSTDKEVNLLELADRVQNIEQEKRRLQRKMDRSRRATNPENYNPDGTFKRGVKLTRNKSKRYKRIQHQYAMIQHHQADIRKQQHNELANYLLTLGDCFFVENMSYCDLVHRANKTEISEKTGRYKRKKRFGKSIANKAPAMLITMLKQKCQSRGLEGVKEVDTHVCASQYNHQTDTCIKKALENRWNIMPDGERIQRDLYSAFLLQHCRRDLPEYNRKELQKEFGEELYRVFDREALQRDYPQFVAYHHMTIQRLSELPHTIPSMGIRRSIS

SEQ ID NO: 2419 - protein, 534 aa, unidentified
  REGION 1..534: note = Category: MG81 effectors
  REGION 1..534: note = Description: MG81-702 effector
  source 1..534: note = uncultivated organism sequence
MGWKSKGRGGKRVKRSSTDTCCLTLPLKLEKWQSDRLEKRFEIGRQIYNTIVHAELKKLRKLERTQQYQEIEQKLENAKQEETKELWKKKRQLLDQNGLSENHFKADMKHYYPHFKDNIASSVAVHGIASQAWTAFEKVLLSKDGKMVHFKKKGELSSLRGYSQTGKSGGIEIIFRGSYVEWKGLKLPLKLSPDNDYETEMLSKRVKYVRILRQDGKTKPHWYAQLVLEGKPAVKRDPISGAPKHPIGRGVVGIDIGTRTLAYSADSKVDLIELADRVQNIEQEKLLLQRKLDRSRRATNPENYKPDGTIKKGVKLTRNKSKRYRRIQHQLAMIQHHQADIRKQQHNELANYLLTLGDCFFVENMSYCDLAHRANKTEISEKTGRYKRKKRFGKSIANKAPAMLITMLKQKCQSRGLEGVKEVDTHVCASQYNHQTDTCIKKALENRWNIMPDGERIQRDLYSAFLLQHCRRDLPEYNRKELQKEFGEELYRVFDREALQRDYPQFVAYHHMTIQRLSELPHTIPSMGIRRIIS

SEQ ID NO: 2420 - protein, 391 aa, unidentified
  REGION 1..391: note = Category: MG81 effectors
  REGION 1..391: note = Description: MG81-703 effector
  source 1..391: note = uncultivated organism sequence
MQPKDLTHSHVHSVTRTLRLKVKTESYAWLNTAACEVNQVWNWSAEVSEKAARPCTGERKWLTGFDLNNLSAGASEHFDKVGADTIQRVNGEYAEKRRIAKRYRLKWRTSRGPRRSLGWVPFKAANLKRKGRAVRFCGKTLRVFEPERLEGVQWKQGHFAQDAVGDWWLSLPIAVQVDDSVAPLEKVGIDLGLKEIAVTSDDARCEKGRFYRDIERKIAQAQRRGHRRQAKYLHRRAANRRKDALHKFSRQIVDQYQKIVVGDVSSTKLVKTRMAKSVLDAGWGMLRRYLQYKSQQAGRTFQIVNERNSSRTCSNCDALTGPQGVNGLRVRRWRCAACGASHDREVNAARNHLRRAELPASVRERASVFAGPPSRASRSRKAGLEPVRTVA

SEQ ID NO: 2421 - protein, 522 aa, unidentified
  REGION 1..522: note = Category: MG81 effectors
  REGION 1..522: note = Description: MG81-704 effector
  source 1..522: note = uncultivated organism sequence
MKRSSTDTCCLTLPLKLEKWQSDRLEKRFEIGRQIYNTIVHAELKKLRKLERTQQYQEIEQKLENAKQEETKELWKKKRQLLDQNGLSENHFKADMKYYYPHFKDNIASNVAVHGIASQAWTAFEKVLFSKDGKMVHFKKKGELSSLRGYSRAGKSGGVEIIFRGSYVEWKGLKLPLKLSPDNDYETEMLSKRVKYVRILRKDGKTKTHWYAQLALEGKPAVKRNSISGAPKHPVGHGVVGIDIGTRTLAYSTDSEVNLLELADRVQNIEQEKRRLQRKMDRSRRAMNPGNYKPDGSIKQGVKLTWNNSKRYKRIQHQYAMIQHHQADIRKQQHNELANYLLTLGDCFFVENMSYCDLAHRANKTEISEKTRRYKRKKRFGKSIANKAPAMLITMLKQKCQSRGLEGVKEVDTHVCASQYNHQTDTCIKKALENRWNVMPDGERIQRDLYSAFLLQHCRRDLPEYNRKELQKEFGEELYRVFDREALQRDYPRFVAYHHMTIQRLSELPHTIPSMGIRRIIS

SEQ ID NO: 2422 - protein, 511 aa, unidentified
  REGION 1..511: note = Category: MG81 effectors
  REGION 1..511: note = Description: MG81-705 effector
  source 1..511: note = uncultivated organism sequence
MAKCSTDTCCLTLPLRLEKWQEDRLAKRFEIARQINNTMVRAELKKLRAMEQSEPYKANQEKIQALDWKTQTDKQALKALYKERDKLLRDGGFSEYGFKSDIKNYYKHFNNNIGSNVAFHGIAPQVWAAFEKMLFKKEGKKVHFKKKGDIHSLRGYSAAGKSGGVEIIFRETYIEWKGLKLPLKLSPDNIYETQMLSYRVKYVRLLRKPGKRKDRWYAQLSLEGKPVIKYNPKTGEVRHPIGKGAVGLDIGPQTLAYSAATGADLVELANQVQNVEQEKRRLQRKLDRSRRATNPGNYADDGTIRRGIALTHNKSKRYLRTQQELKYLQHQQAEIRKRQHTELANHLLSLGDCFYVEKMVWTSLTHRAKETEISEKTGKIKRKKRFGKSVANKAPATLIGILQRKSAALGIPGVIEVPTSVKASQYNHQSGTYTPKPLSQRWNNMPDGERIQRDLYSAFLLQHYDPQTNTFDANSLHQDYPQFVQYHHDAVLRLYAMPKTPSSMGIKRSLR

SEQ ID NO: 2423 - protein, 343 aa, unidentified
  REGION 1..343: note = Category: MG81 effectors
  REGION 1..343: note = Description: MG81-706 effector
  source 1..343: note = uncultivated organism sequence
MPPSLMRTLRLKVRSEAYPWLNAAAIEVNAVFNYCNETSLKAATRTDLKRKWLTGFDLCALTAGATEYFDKIGADTIQSVCIHYAQKRKAAKKLKLKWRVSRGAQRSLGWIPFKAASLKRKGRGVRFAGKCIRVFERERLEGVKWQGGEFAQDAVGDWWLCLPVKVQADCSIAPQEEVGIDLGLKTIAVTSDGDRLEAGRWTHRYAEKLASAQRRGHKRQAKRIHRKIARCRADALHYFSRKMVDRYQKIVVGDVSSLKLVKTRMAKSVLDSGWGTLKRFLEYKCEHAARSFEVRDERYSTVTCSNCGALSGPREVNGLIVDHGNVATVESCMTETLIRLGIT

SEQ ID NO: 2424 - protein, 350 aa, unidentified
  REGION 1..350: note = Category: MG81 effectors
  REGION 1..350: note = Description: MG81-707 effector
  source 1..350: note = uncultivated organism sequence
MQTITIKLRLRDKHSAELRRQARAVNFVWNYCNETQQKAARDRRKLLTGFDLAKLTSGTSKMLDLHAHTISRVAIQYEKSRKQHRKLWLKWRGRKSLGWVPFNTGHVSFDGACLKFRGKVYEPMHLRDVLMPGVKIGAGSFNQDSRGRWYINLPVQAVTADSAPVARIGIDLGLKSLATMSDGSKIEAPRFYKTSETALATAQKRRKSKRTKAIHAKIANRRKDFLHKESARLAKTYGLIVVGDVSPNAIAKSRMAKSSLDAGWAAFKGMLSYKAIRHGGSTLEVSERYTTQTCSCCGSVGSSTRPKGIAGLGIREWSCEDCGTTHDRDVNAARNILRRGLATLAEGTPA

SEQ ID NO: 2425 - protein, 538 aa, unidentified
  REGION 1..538: note = Category: MG81 effectors
  REGION 1..538: note = Description: MG81-708 effector
  source 1..538: note = uncultivated organism sequence
MNNEEKEKDGATCCLTLPLKLEKWQSDHLEKRFEIARQLYNTLVHAELKKKCQVERMPEYQEIMKMIDAASNQKEKWALEKKRKAFLEENGFNRNAFKADMEKYYKHFNDNIGANVALHGITAQVWIAFDKVFVDNYKQKGKVHFKKPGELCSVQGYSQKKSGGKEIMFREDRIIWNQQGNRDRKKVKREFLLKLSPDNPYEAEMLKRHVKFVRILRKDGKTKPHWYAQLVLEGKPAVKRDPASGAPKHPIGHGVVGIDIGTRTLAYSTDKEVNLLELADHVQNIEQEKRRLQRKMDRSRRATNPENYNPDGTFKRGVKLTRNKSKRYRRIQHQLAMIQHHQADIRKQQHNELANYLLTLGDCFFVENMSYCDLVHRANKTEISEKTGRYKRKKRFGKSIANKAPAMLITMLKQKCQSRGLKGVKEVDTHVRASQYNHQTDTCIEKALENRWNVMPDGERIQRDLYSAFLLQHCKQGLPEYNRKELKKEFGEELYRVFDREALQRDYPQFVAYHHMTIQRLSELPHTIPSMGIRRIIS

SEQ ID NO: 2426 - protein, 356 aa, unidentified
  REGION 1..356: note = Category: MG81 effectors
  REGION 1..356: note = Description: MG81-709 effector
  source 1..356: note = uncultivated organism sequence
MKTLHIRIKDKHAKALDALARDVNMVWNYCNDLSYKHLQRTGKFFSSYDLQKYTAGATKEGLSINSASVQMIGAELVTRRKQFKKAKLRWRTSFGSRKSLGWIPFRHDCIAYKNGQLRYAGQCFGLWDSYGLSQYKLGSGSFSQDARGRWYANICVEVPVFVGPIKPPELCECVGIDLGLKDFATMSDGVKVEAQRLYRCAEAKLAVAQRANKKARVKAIHAQIANRRKDALDKLSTKLVCENRAIFVGNVNASGLAKTNMAKSVLDAGWTSFRTMLSYKSIATGVLFDEVNEAYSTQTCSCCGTLPDSRPRGIAGLGIREWTCSECGAHHDRDVNAAKNILQRGHALLAVGIPVL

SEQ ID NO: 2427 - protein, 538 aa, unidentified
  REGION 1..538: note = Category: MG81 effectors
  REGION 1..538: note = Description: MG81-710 effector
  source 1..538: note = uncultivated organism sequence
MDNEEKKEDGATCCLTLPLKLEKWQSDHLEKRFEIARQLYNTLVHAELKKKCQVERMPEYQEIMKMIDAASNQKEKWALEKKRKAFLEENGFSRNAFKADMEKYYKHFNDNIGANVALHGITAQVWIAFDKVFVDNYKQKGKVHFKKPGELCSVQGYSQKKSGGKEIMFREDRIIWNQQGNRDRKKVKREFLLKLSPDNPYEAEMLKRHVKFVRILRKDGKTKPHWYAQLVLEGKPAVKRDPASGAPKHPIGHGVVGIDIGTRTLAYSTDKEVNLLELADRVQNIEQEKRRLQRKMDRSRRATNPENYNPDGTFKRGVKLTRNKSKRYRRIQHQLAMIQHHQADIRKQQHNELANYLLTLGDCFFVENMSYCDLVHRANKTEISEKTGRYKRKKRFGKSIANKAPAMLITMLKQKCQSRGLKGVKEVDTHVRASQYNHQTDTCIEKALENRWNVMPDGERIQRDLYSAFLLQHCKQGLPEYNRKELKKEFGEELYRVFDREALQRDYPQFVAYHHMTIQRLSELPHTIPSMGIRRIIS

SEQ ID NO: 2428 - protein, 352 aa, unidentified
  REGION 1..352: note = Category: MG81 effectors
  REGION 1..352: note = Description: MG81-711 effector
  source 1..352: note = uncultivated organism sequence
MKTLKLRIKDKHSAVLNQMACEVNFVWNYVNDLGFKHLKRKGEFLSAYDIAKYTKGTSKECNLHSQTIQAVTEELVTRRKQFKKAKLKWRVTNKKSARRSLGWIPFKKIAIKYANGYVQYGKHQFRVWDSYGLSQYSVKTGSFVEDARGRWYVCLVVESSKTVKITSTKAIGIDLGLKDIATCSDDTVISNPKFYRKYEQKLGIAQRARNKKRVRALHAKIGNCRKDYLHKSSTMLVKKNALIVVGDLSAKKLVKTKMAKSVLDTGFSALKTMLKYKCENAGVLFEEVNERFTTQICSCCGEITTGSPKGRADLRIRVWECECGSINQRDLNSAKNILALGHKRLAVGISLF

SEQ ID NO: 2429 - protein, 350 aa, unidentified
  REGION 1..350: note = Category: MG81 effectors
  REGION 1..350: note = Description: MG81-712 effector
  source 1..350: note = uncultivated organism sequence
MIVVYRYRVKSLNGLLNKQSRAVNYVWNFCNDTQKHALKWGKKWPTGFDLNVLTTGSSKELGIHSGTVNATCEQYAKSRSQHRRPFLRYRGRRSLGWVPLKGRDLKREGQAFRFAGNTFRVFNSRPLPEGKIKDGTNFAQDARGNWFLNIVIEVADVPARPIRTGVGVDLGLKDFATLSTGEKLPNDRFGRCAAEKLAKAQRARKHKRHIAKLHAKVANARADFQHKLALDLVRRFDYIAVGNVSAAKLAKTRMAKSVYDASWSSFRDRLRYKAIAHGATFEEVNESGTTQSCSACGSKDCTTRPRGISGLRIREWTCSRCGVVLDRDTNAALNILRCGRASPAVGISCL

SEQ ID NO: 2430 - protein, 367 aa, unidentified
  REGION 1..367: note = Category: MG81 effectors
  REGION 1..367: note = Description: MG81-713 effector
  source 1..367: note = uncultivated organism sequence
MYQVLKLRIYRKHYVKLDKLSSAVNFVWNYVNDLCWQMWRRKRIFPSAYDIHEYTKGAGEELGLHSQTIQFIGEKHHQSRKQHKKVKLAWRTNRKDAKRKSLGWIPFKASAISHVKTYNTGKKALKSQVQLSCGKEKLILTVYDQYDLRRYNGFRTAEIVQDSCDDWYLCLLVKVEPKVCTATSEVGIDYGCKTAAICSNGDKLETKFTQQYAEKLATAQRAHKKKQARRINRKIKNKRADATHQFTGKLVKENRLIVAGNVKSSSFTSGKLAKSVYDANWFAINRQLEYKSRRAGCQFIKVDEKFSTQTCANCLQITNSSPKGVAGLGIREWICDCCGQLNDRDVNAAKNILRFGRETLAGGSPIL

SEQ ID NO: 2431 - protein, 349 aa, unidentified
  REGION 1..349: note = Category: MG81 effectors
  REGION 1..349: note = Description: MG81-714 effector
  source 1..349: note = uncultivated organism sequence
MLQVQLKLRPCKAQEQIYDQWLYNLASVYNFAVRKIELNAKDKIYFSKNDFQNLLANHGEKLGIPSHTIQGVLCTVHDAWKRCFKKTAGKPKLKGMRNKMSSIPFPDPIKAPKGNRITLPGLGSVRFHKQEISEGKIKCGRLIKRASGWYLCLFIDAEPNPIKRLAFGAIGIDPGFSNLLTTSDGEVIEHPRELEAAAERLGQAQRGHNKQLAARIQERIANRKKDRNHKLTTKLVSENVLIVWSKDAIKGIAKRFGKSVSSSSHAQIRQMLSYKMPKSGGTFIEVASKYSTKTCNECGNPTGPTGLAELSVRQWRCSACGAEYDRDVNAARNTLFAGAGCAHEELAYV

SEQ ID NO: 2432 - protein, 350 aa, unidentified
  REGION 1..350: note = Category: MG81 effectors
  REGION 1..350: note = Description: MG81-715 effector
  source 1..350: note = uncultivated organism sequence
MIVVYRYRVKSLNGLLNKQSRAVNYVWNFCNDTQKHALKWGKKWPTGFDLNVLTTGSSKELGIHSGTVNATCEQYAKSRSQHRRPFLRYRGRRSLGWVPLKGRDLKREGEAFRFAGNTFRVFSSRPLPEGKIKDSTNFARDARGNWFLNIVIEVADVHARPIRTGVGIDLGLKDFAALSTGEKLPNDRFGRRAAEKLAKAQRARKHKRHIAKLHAKAANARADFQHKLALDLVRRFDYIAVGNVSASKLAKTRMAKSVYDASWSSFRDKLRYKAIAHGATFEEVNESGSTQSCSSCGSKDSTTRPKGIAGLRIREWTCSVCGVVHDRDTNAALNILRCGRASPAVGISFL

SEQ ID NO: 2433 - protein, 358 aa, unidentified
  REGION 1..358: note = Category: MG81 effectors
  REGION 1..358: note = Description: MG81-716 effector
  source 1..358: note = uncultivated organism sequence
MTKTFSFRIKDSTSAKHLRAMARAVNYVWNYCNEIQKKAAHDNRRWVNWVMLNNLTSGCSKELRLHSQTIQAIGERFHASLKEAKFPTGKKKRFLRFRGRRSQGWIPFKASGIKLRDDVVVYQGRTFRFWKSRDIPSTIKCGNFSCDARGRWYVNLVCKYEETIVSKEDTVGIDLGLKSVATLSNGKKYDAQKFFRKYERKLVHHQRCNNGRQVRTIHAKIANSRKDFNHKVSHELTRDFNKIFVGDVGCLSLLKTKLAKSVSDASWGQLRTFIEYKAIARGGTYYVVDENNTTRTCSACGCLSGPSGLAGLRVREWQCKECGTVHDRDTNSAINIEQRGLLTLCSPLRTLSAKEEIL

SEQ ID NO: 2434 - protein, 386 aa, unidentified
  REGION 1..386: note = Category: MG81 effectors
  REGION 1..386: note = Description: MG81-717 effector
  source 1..386: note = uncultivated organism sequence
MAGDIPPNNDDQLNINTLYVHTTMNIQIKILSVRIKDKHAAVLRQMAFEVNQIFNLANEITSAAYGNAGFFGAQKPQWLSAFDVQKPLLKERKERGYTIPSHTVQEIAAIHGKARKQFKRSRLRWRVSGGSRRSLGWVPFKIGSAVWKNGAVRFAGRIFNVWDSYGLGGFKFRAGSFSEDSRGRWYFNVCVEVETVPSTATSAVGIDLGLKDYATPSEGDPLIAGRFYRDLEPALGKAQRANKKARVRAIHAKIKNRRKDALHKYSTALVNSHAAIFVGDASSKKLVKTKMAKSILDAGWFMLKTQLEYKAIARSVMFEVVNESYSTQACSCCGAISANSPKGRAGLRIREWTCCECGTTHDRDVNAAKNILAAGHRRLAVGIPFL

SEQ ID NO: 2435 - protein, 570 aa, unidentified
  REGION 1..570: note = Category: MG81 effectors
  REGION 1..570: note = Description: MG81-718 effector
  source 1..570: note = uncultivated organism sequence
MHGTSQSFSGVFCVQIRGVLRPVFGGWKALFRDLECNPLQICEFWPIINIITKKRGIPVKKCTTDTCCLTLPLKLEKWQEDCLAKRFEIARQIYNTLVRAEFKKLNELERTPEYNKILEQIHSLDWKGSGNRQRLNDLYRERNQILKNAKFTEYGFKSDMKFYYKHFSDNIGSCVAVHGIAPQVWAAFEKYLFKPEGKKVHFKRFGDVHSLRGYSKAGESGGAEITFCGTHIRWKNLELPIKLSPDNAYETEMLSRRVKYVRILRKPGKSKDRWYVQLSLEGKPAIKYDRNAGEIKHPVAHGAVGLDIGPQTLAYSAETTADLVELADQVQNIEQEKRRLQRKMDRSRRSTNPGNYNTDGTIRRGVKLTRNKSKAYCKLQRQLAYLQHTQAETRKRQHTELANYLLSLGDCFYVEEMKWSSLAHRAKETAVSEKTGRFKQKKRFGKSIANKAPSTLIGILQQKCESLGLPGIIYVPLSAKASQYNHLTGEYTPKPLSQRWNTMPDAQRVQRDLYSAFLLQHFDSQAGIYNLQSLQRDYPQFLQYHDQSIRRLSEMPKTLSSMGIRKSIRA

SEQ ID NO: 2436 - protein, 336 aa, unidentified
  REGION 1..336: note = Category: MG81 effectors
  REGION 1..336: note = Description: MG81-719 effector
  source 1..336: note = uncultivated organism sequence
MQTYHFRIKDSTHINWLCKKAGIVNHIWNEVQSFRLSFYNLFGDLFSEYDIHKICKFQNINSATVQLVIKNYIQKSKQFKKLKLKWRTSRKSLGWIPFDKRNFLFDYETGTATYMKRSFKLWYSQKVDGNVLCGSFNQDASGHWFLNITTDAVIEKERVCDREIGIDLGCKEQITCSDGVVYERENLTRKFADKLATAQRARKKRQVTKIHRKIKNIRNDWNNKVTTDICRTSKLVVVGNIIAKGLCKTRMAKSIFDVATFQIKSMLSYKAIRHCMDVLIVSEKFSTVTCSVCHEKTGPSGLSGLGVRAWDCPICGSHHHRDVNAAINILSSVRGI

SEQ ID NO: 2437 - protein, 538 aa, unidentified
  REGION 1..538: note = Category: MG81 effectors
  REGION 1..538: note = Description: MG81-720 effector
  source 1..538: note = uncultivated organism sequence
MDNEEKEKDGATCCLTLPLKLEKWQSDHLEKRFEIARQLYNTLVHAELKKKCQVERMPEYQEIMKMIDAASNQKEKWALEKKRKAFLEENGFSRNAFKADMEKYYKHFNDNIGANVALHGITAQVWIAFDKVFVDNYKQKGKVHFKKPGELCSVQGYSQKKSGGKEIMFREDRIIWNQQGNRDRKKVKREFLLKLSPDNPYEAEMLKRHVKFVRILRKDGKTKPHWYAQLVLEGKPAVKRDPISSAPKHPVGHGVVGIDIGTRTLAYSTDKEVNLLELADRVQNIEQEKRRLQRKMDRSRRAMNPENYNSDGTFKRGVKLTRNKSKRYRRIQHQLAMIQHHQADIRKQQHNELANYLLTLGDCFFVENMSYCDLVHRANKTEISEKTGRYKRKKRFGKSIANKAPAMLITMLKQKCQSRGLEGVKEVDTHVRASQYNHQTDTCIEKALENRWNVMPDGERIQRDLYSAFLLQHCKQGLPEYNRKELKKEFGEELYRVFDREALQRDYPQFVAYHHMTIQRLSELPHTIPSMGIRRIIS

SEQ ID NO: 2438 - protein, 538 aa, unidentified
  REGION 1..538: note = Category: MG81 effectors
  REGION 1..538: note = Description: MG81-721 effector
  source 1..538: note = uncultivated organism sequence
MDNEEKEKDGATCCLTLPLKLEKWQSDHLEKRFEIARQLYNTLVHAELKKKCQVERMPEYQEIMKMIDTASNQKEKWALEKKRKAFLEENGFSGNAFKADMEKYYKHFNDNIGANVALHGITAQVWIAFDKVFVDNYKQKGKVHFKKPGELCSVQGYSQKKSGGKEIMFREDRIIWNQQGNRDRKKVKREFLLKLSPDNPYEAEMLKRHVKFVRILRKDGKTKPHWYAQLVLEGKPAVKRDPASGAPKHPIGHGVVGIDIGTRTLAYSTDKEVNLLELADRVQNIEQEKRRLQRKMDRSRRATNPENYNPDGTFKRGVKLTRNKSKRYKRIQHQYAMIQHHQADIRKQQHNELANYLLTLGDCFFVENMSYCDLVHRANKTEISEKTGRYKRKKRFGKSIANKAPAMLITMLKQKCQSRGLEGVKEVDTHVRASQYNHQTDTCIEKALENRWNVMPDGERIQRDLYSAFLLQHCKQGLPEYNRKELKKEFGEELYRVFDREALQRDYPQFVAYHHMTIQRLSELPHTIPSMGIRRIIS

SEQ ID NO: 2439 - protein, 368 aa, unidentified
  REGION 1..368: note = Category: MG81 effectors
  REGION 1..368: note = Description: MG81-722 effector
  source 1..368: note = uncultivated organism sequence
MKTLKLRIRDKHTAKLNRLSGAVNFVWNYVNALSYEHLKRTGKFFSAYDLNEYTKGSGELVGLHSQTIQAINETHAKARKQFKKAKLSWRTNNPKSKRKSLGWLPFKKSAIKHIATYQTGKKGLKSTLQLSLAKGQKLIIDLWDSYNLSLYQINTLEIVQDSRNRWYACITVKEYPKTTCGTGSVGIDLGLKDSATASNGDKLQIKQTLKYAKQLAIAQRSNNKKRIKAIHAKIKHTRQDLIHKFTTQLVKDNALIVVGDVKTTQFNSKKGKLAKSVYDAGWFELKRQLTYKCENAGCRFEIVSERYTTQTCSCCGQIDRNSPKGRAGLRIREWTCAMCGTWHDRDINASRNILAVGLGRLGAGIPER

SEQ ID NO: 2440 - protein, 512 aa, unidentified
  REGION 1..512: note = Category: MG81 effectors
  REGION 1..512: note = Description: MG81-723 effector
  source 1..512: note = uncultivated organism sequence
MPTKQKEGGNRCVLTLPLLTEPWQEHIIEKRFKIIEHLKNQLISIELRKLKNLQRTKAYKNLIKQIESVPKSERTALYKERNKMLKDAGFSQYTFMDDMAGKKSLMQKHFESHINVQIAHKAAIDVWSSFEKFLFGTGQIVHYQKRGTLSSVASKSPKTGMFYYSDENIFKWSGGGTKPKGGIILCLRVASVKTNYEKEMVANNEIKYYRVVRKWMKTKYKYYLQITFAGKPADKHREISTGRVGIDIGTQTIAIASDKSVKLLELADKVNKNHIKKCELQRKLDRSRRYTNPDNFNPDGTVKRGTKGHKLKWNKSKHYIEIAGKIRELERKNADIRKYQHTCLANDILAMGNQIYIEPMDYKGLQKRAKETQVDEKGRYKKKKRFGKSLANKAPAMFVTILKTKVEQHGGEVYEVDIMSYRASQCDHTTGEYTKHGLNDRWRILGNGDKVQRDLYSAFLIKNSNKTHDEIDLDKCSKTYDSFKKLHDTEIENIRNEVMLRERKNISSYGIA

SEQ ID NO: 2441 - protein, 360 aa, unidentified
  REGION 1..360: note = Category: MG81 effectors
  REGION 1..360: note = Description: MG81-724 effector
  source 1..360: note = uncultivated organism sequence
MEVTKMLVRELKLKPTKRQEATLNEWLWCLTGVYNWASRKIELDAQDKIYHRKLAFQNSLSGVSKKLDIPSHTIQATILQAYNAWERCFKKVSKQPKLKSVRNKLRSICFPDPLNGKRISENRISLPGLKSVRFYKQDLPEGSIKQARIVKRALGWYCQICIDTVHIFPVENTDEAVGIDTGFKDLAILSTGKKFSNGREFVKGQKRLAQAQRGGRKKLAARLYERISSRRKDYNHKVSRQIVQNFKEIYITNDNLRGQAKIFGKSVSDAGISQLRQFLIYKGAQHSRKVVLVDSKYTTMTCSICGSLTGPTGLSGLVVRTWKCGACGAQHDRDVNAAKVILKSGLGCSLGVLESSGGAR

SEQ ID NO: 2442 - protein, 338 aa, unidentified
  REGION 1..338: note = Category: MG81 effectors
  REGION 1..338: note = Description: MG81-725 effector
  source 1..338: note = uncultivated organism sequence
MNDLSFQVWRRKRVFLSAYDIHEYTKGAGEELGLHSQTLQAVGETHAKSRKQANRSKLHWRTNRKDAKRKSLGWIPFKASAVKVLRTYNTGKTALKSQVQLSCGKEKLILTMYDQYDLRRYTEIKTASVVEDICGNWYLCLTVKVNPVTANIATGEVGIDLGCKTAATCSNGDKLETKFTHQYAEKLATAQRAHKKKQARKIHRKIRNSRANATHQFTNLLVKNNRLIVIGNMKASTFTSGKLAKSVYDANWSEIERQLEYKCEHAGCLLVKVNENFSTQTCANCLQITNSSPKGVAGLGIREWICGCCGQLNDRDVNAAKNILRFGRETLAEGSPVI

SEQ ID NO: 2443 - protein, 387 aa, unidentified
  REGION 1..387: note = Category: MG81 effectors
  REGION 1..387: note = Description: MG81-726 effector
  source 1..387: note = uncultivated organism sequence
MIIPMQTKTLKLRIKDKHAAWLRGLAREVNQVFNFCNEVSAKASSPYNSKPRWLSGYDLQKLVAGSTKGEDALSIPSQTLQQVCEEYASRRKQFKKHKLRWRVSNPKSSKYSLGWLPFKKGTVVYKNGQIRYAGKLLSLWDSYSLGQFELRAGSITEDSRGRWYLNVVVQVESTNGNGTSILGIDLGLKEAASCSDGQVLKSRWFREMEQALATAQRSGKKMRTKAIHAKIANRRKDAMHKLSTKLVKENAAIFVGNVASAKLVKTNMAKSTLDAGWSMFKTMLEYKAQAAGVVFEEVNEAWSTQKCSACGSIEGPKGRKELYVRSWTCSCGAHHDRDVNAATNICAKGLAQLAISKAAEVEAGEPVLNKAQAEVGHGLPAEGILTL

SEQ ID NO: 2444 - protein, 377 aa, unidentified
  REGION 1..377: note = Category: MG81 effectors
  REGION 1..377: note = Description: MG81-727 effector
  source 1..377: note = uncultivated organism sequence
MNGASSTKTKVLRLRLKDKHAKLLRDLAREVNFVWNYCNELQITMFNRERRFLSGYDFPKFTRGATKEGLRLHSQTVQAIAEEYATPRRQFSKVRLSRRKSTGNRRSLGWIPFKKSAIQPAHGQVKFAGQWLSLWDSYGLEAYQIRAGNICEDARGRWYLNACVAVPSAEPRSSARRDVGIDLGLEDLVATSDGGKLSAPQFYRGLEPKLVIAQRAVKKHRVRAIHAKIANRRNDSLHQFSTRLVRGYDTIFVGNVNASALVKTTPYAKSVLDAGWSAFRTMLRYKCDFAGATFAEIDEAFSTQTCSACDSRSGPKGIAGLGIRAWKCSKCGAVHDRNVNAAKNILAAGRRRLAEGIPAPFRAREDVKNAVVLGKPL

SEQ ID NO: 2445 - protein, 383 aa, unidentified
  REGION 1..383: note = Category: MG81 effectors
  REGION 1..383: note = Description: MG81-728 effector
  source 1..383: note = uncultivated organism sequence
MIQCQLKLRLTKAQEATLEVWLFRLTGVWNWAVRKIELDARDKIYHSKYDLDAMLVGHCTRLEIPKQVLKCTIFTVHQAWMRCFKKLSKKPRLKGNRNRLNSIPFSAQILRPKAARIHVSGLGKVKFHKQEMPEGKIKCARIVRRASGWYYCLFIDAEPNAIPRKASGQIGIDAGFKNLLTASTGEIIEHPRELEAVAQRLGQAQRARNRKLTARIQERIRNRRKDRNHKISRQLVSENVLIAFSKDSHNRIAKRFGKSVASSGHGQLRSMLTYKSRAGGAVYVEPESRNSTKRCSNCGSLSGPTGLSGLAVRRWTCGCGAEHDRDCNAAINTLIVGLGMSHERAHKTPVRNPVPPSEVQVEELKHRKFIPEQAGFRRRKIWK

SEQ ID NO: 2446 - protein, 364 aa, unidentified
  REGION 1..364: note = Category: MG81 effectors
  REGION 1..364: note = Description: MG81-729 effector
  source 1..364: note = uncultivated organism sequence
MKTYQFRLKSTNQAKLSKMAGAVNFVWNYVNSVSKEYTEKKGVWLSAFDLQHLTKACSGELGLNAKTVQMICHEHVNRRKGSKRLQLAWRSKNRSLGWIPFSGQDLPLKGDVVKHIGIEFRFWKTREIEGKIKVGSFCQDARGRWYVNFTCESVNKEPVDSNISVGIDLGLKTIATLSDGRTLNRENITNKYADRLAMAQRAGKKRLTKTIHTKIKNVRKDWNHKQTTNIVNSYDTIVVGNVSSSKLKKTRMAKSVSDAGWADFKRMLAYKAIALGVQYKEVNESFSTVTCSICEGKTGPTGLSNLGVREWTCSTCGTIHLRDVNAAKNILRIGHNALLMESSNLGKMSKTMDKKQNDIDTGNG

SEQ ID NO: 2447 - protein, 390 aa, unidentified
  REGION 1..390: note = Category: MG81 effectors
  REGION 1..390: note = Description: MG81-730 effector
  source 1..390: note = uncultivated organism sequence
MNDPLMPLSFTRTLKFKVKAESYAWLNAAAVEVNQVFNFANQASYDARRRTDLKSKWLSGFDLCNLTSGATEYFERIGADTIQQVCTHYAQKRTAAKRLKLRWRVSRGARRSLGWMPFKAASLRRRGNALRFCGKTFRVFERERLADVKWRDGCFAQDAVGDWWLCLPVIVTAEQTIAPLESVGIDLGLKTIATTSDGEKLEAGRWTAGNAEKLAAAQRRGHKKQAKRIHRHTANQRKDALHKFSRKIVDSYQTIVVGDVSSTKLVKTKMAKSVLDSGWGMLKAQLQYKGQQAGRSVSVVSERNTTRACSSCEAFTGPAGLDMLVVRRWDCPACGAEHDRDINAARNILIAGSRCLTSVSGNESSDSPVPSSRLRKRRRETGTETARTAA

SEQ ID NO: 2448 - protein, 351 aa, unidentified
  REGION 1..351: note = Category: MG81 effectors
  REGION 1..351: note = Description: MG81-731 effector
  source 1..351: note = uncultivated organism sequence
MILVYRYRVKSPTKILDEQSRAVNYVWNFCNESQKSCLRLGKRWLSGFDLDYLTTGTSKELGLHSGTINSVCDQYAKSRKQKKRPFLRWRGKKSLGWIPFKGRNLKWKGDAFVFGGNTFRVFFSRPIPDGAIIRDGSNFSQDARGNWFLNVVLRLPDNPRRGIRTSVGIDLGLHDLAALSTGEKIENPRHLAKLADKLARAQRAGKKKQATNIHAHVKNARRDFQHKLSTCLVKQFDAIYVGNVSSSKLSKTRLAKSVLDAGWSSFRSMLAYKCDYAGGRFSEVNESFSTQVCSSCGCLPEGRPKGIADLGKRQWDCVECGSHLDRDLNSALNILHAGSGHRSPAEGIPAL

SEQ ID NO: 2449 - protein, 389 aa, unidentified
  REGION 1..389: note = Category: MG81 effectors
  REGION 1..389: note = Description: MG81-732 effector
  source 1..389: note = uncultivated organism sequence
MAEPILTQTIGVTLKLRPTCAQAATMQRWLWHLTAVYNWAVKTIERDAERRVYRSTFDMYALVNGHSRRLEIPRSAIRGTIGTAHNAWQRAFHRVSRRPKLKGRRRPLNSIAFSQANKRPIRGRRIYLAGLGEVRFHEQAIPDGKIVCLRVVKRASGWYVCLFMNAAPRTIPRVAAGQIGIDPGFSSLLTLSSGELIEHPKELKVAALRLAQAQRGKRRRLTARIQERIANRRKNRNHHLSRQLVAENTFIAFSKDRIKAIEKRFGKSTASAAHAQLRSQLRYKSLTGGTKFIEVPSRNSTRTCSACGALTGPTGWSGLTVRQWTCGCGAEHERDVNAARNTLFAALGTSVESRREAASGIASKATSRGSCLVAWGPLPCTTADLSTPI

SEQ ID NO: 2450 - protein, 913 aa, unidentified
  REGION 1..913: note = Category: MG81 effectors
  REGION 1..913: note = Description: MG81-733 effector
  source 1..913: note = uncultivated organism sequence
MSYLAAKYIDLGKGVYHFTMKDKLDMLNKNEAVTDLRFGIVSEKYEKGITSFDYERIKAEEELDRNIAAYVTFAADIFAKSVIKSDYRTKKDNNSDVLQYSDKEFRNSEVIRDNAEKNILQYWGGYSRWGTENSKLPENNKVSDFGKLDVSDLCIDIKKHLAGIRNSSVHYTTKIKNESAADGSNVKILFEKDLADINIIYADKYYSNNVWMFYSLEDINKLIAFLYKEKRVIRQVQIPSFSRILKRKAMQDVINEIFKDDFDENIVNPELKEKYRNSLYFMLKEIYYNAFIIQPELKEKFKDKIKTMKSELYNKLKTIDKKEYKALYCMLSNEESALKNFADRIYSVDGDNVSFADICKILMTDYNMQNQEKKNIESMEQKKKNKGKDENYKHFPLLLHKVLKELFIEYLKQTHELEFLRNNICIKSDVTMESFESQIKGVEIYKDLKEKIDKNNSLLDWYVIAHFLMPKQLNHLIGNIKNYIQFATNIDKRAESVKNLTGSGMVKRIQYYDDIVRTLEFSAQYIGKISNNINDYFNSEDEYVSFLSKYVGFINDKSEDVLTELKDFCREKINNGSQIIGIYYGGDNVIINRNVIYAQMYSNAEVFSNIYKKVTKNDIINYYEKQNDLKDVFKSGVCQNEDEQRSLCEFQQLKNRIELTELSTYADMVNDFMAQFVEWAYLRERDLMYFQLGIHYIRLFYSDNVLDEKYHKLSDNVIDIEEGALLYQIVAMYDYELRIFETDNSGNAKRIGQGGPGKSIPVFLKKYCNVTDVYECGLELFEDINQHEHIIRFRNDIAHMRYMSNQAMNIMSIVSNIYKSFFVYDTKLKKSISLVFKNILMRYGVIADLVFSYNNKNQSIKDDMDINIINIKNLKSDKYVYKIVNEDIVKQVEIEIRNQVFLEQLHNLLYFSR

SEQ ID NO: 2451 - protein, 364 aa, unidentified
  REGION 1..364: note = Category: MG81 effectors
  REGION 1..364: note = Description: MG81-734 effector
  source 1..364: note = uncultivated organism sequence
MNIQIKTLKVRIRDKHADVLNRMSFEVNQVWNAANETSAEFAWVPVPEVGYMNMQTSGFDLMKELKGIRKERSMIISARTVQEVIAVHAKTRKQFKKDKLRWRSSGGARRALGWVPFKSGSACWINGQVRFCGIYFKCWDSYGLSQYDFRSGCFSEDSRGRWYFNIVVHVEEEVRLSEGGQIGIDLGLKTTATCSNGVVLERKQFYRNLEEKLGKAQRANKKKLVKTIHAKIKNQRLDANHKFSRKIVNENSLIVVGNVSSSGLAKTKMAKSVLDAGWFMLKTMIDYKSKAMQSAFIEVNEAYTTQACSCCGCISSSSPKGRRDLDVREWTCAECGTEHDRDINAAKNILSLGHQRLAVGILSL

SEQ ID NO: 2452 - protein, 511 aa, unidentified
  REGION 1..511: note = Category: MG81 effectors
  REGION 1..511: note = Description: MG81-735 effector
  source 1..511: note = uncultivated organism sequence
MAKCSTDTCCLTLPLRLEKWQEDRLAKRFEIARQIYNTMVRAELKKLRAMEQSEPYKANQEKIQALDWKTQTDKQALKALYKERDKLLRDGGFSEYGFKSDIKNYYKHFNNNIGSNVAFHGIAPQVWAAFEKMLFKKEGKKVHFKKKGDIHSLRGYSAAGKSGGVEIIFRETYIEWKGLKLPLKLSPDNIYETQMLSYRVKYVRLLRKPGKRKDRWYAQLSLEGKPVIKYNPKTGEVRHPIGKGAVGLDIGPQTLAYSAATGADLVELANQVQNVEQEKRRLQRKLDRSRRATNPGNYADDGTIRRGIALTHNKSKRYLRTQQELKYLQHQQAEIRKRQHTELANHLLSLGDCFYVEKMVWTSLTHRAKETEISEKTGKIKRKKRFGKSVANKAPATLIGILQRKSAALGIAGVIEVPTSVKASQYNHQSGTYTPKPLSQRWNNMPDGERIQRDLYSAFLLQHYDPQTNTFDANSLHQDYPQFVQYHHDAVLRLYAMPKTPSSMGIKRSLR

SEQ ID NO: 2453 - protein, 511 aa, unidentified
  REGION 1..511: note = Category: MG81 effectors
  REGION 1..511: note = Description: MG81-736 effector
  source 1..511: note = uncultivated organism sequence
MAKCSTDTCCLTLPLRLEKWQEDRLAKRFEIARQIYNTMVRAELKKLRAMEQSEPYKANQEKIQALGWKTQADKQALKALYKERDKLLQDGGFSERGFKSDIKNYYKHFNNNIGSNVAVHGIAPQVWAAFEKMLFKKEGKKVHFKKKGDIRSLRGYSITRKSGGVEIIFRETYIEWKGLKLPLKLSPDNSYETQMLSYRVKYVRLLRKPGKRKDRWYAQLSLEGKPVIKYNPKTGEVRHPIGKGAVGLDIGPQTLAYSAATGADLVELANQVQNVEQEKRRLQRKLDRSRRATNPGNYADDGTIRRGIALTHNKSKRYLRTQQELKYLQHQQAEIRKRQHTELANHLLSLGDCFYVEKMVWTSLTHRAKETEISEKTGKIKRKKRFGKSVANKAPATLIGILQRKSAALGIPGVIEVPTSVKASQYNHQSGTYTPKPLSQRWNNMPDGERIQRDLYSAFLLQHYDPQTNTFDANSLHQDYPQFVQYHHDAVLRLYAMPKTPSSMGIKRSLR

SEQ ID NO: 2454 - protein, 351 aa, unidentified
  REGION 1..351: note = Category: MG81 effectors
  REGION 1..351: note = Description: MG81-737 effector
  source 1..351: note = uncultivated organism sequence
MLHTKTLKVRVRDKHAPLLRQMARSVNFVWNYLNELSQRSIRERGGFLSAYDLHPYTKGAAKELGLHSQTLQCIAAEYVTRRKQFKKVRLNWRKSAGVRRSLGWIPINTGAASWKNGQVYHNGHYFKVWDSYGLAGHKFRSGSFSEDSRGRWYFNVVVDVEESVSMGQGSVGIDLGLKDIATCSDGRQLENNQFYRGMQQKLAIAQRSRNKARTRAIHAKITNRRKDALHKFSRKLVDSYGTIIVGNVSPSKLVKTKMAKSVYDAGWSMLKTMLEYKCDHAGIVFKEVNEAYTTRACSACGSLTGPRGVNGLRIREWTCCECGVAHDRDINAARNILALGHERPSVGIPVL

SEQ ID NO: 2455 - protein, 367 aa, unidentified
  REGION 1..367: note = Category: MG81 effectors
  REGION 1..367: note = Description: MG81-738 effector
  source 1..367: note = uncultivated organism sequence
MYQVLRLRIYRKHNAKLNKLASAVNFVWNYVNDLCLQMWQRKRVFPSAYDVAEYTKGAGEYLGLHSQTIQFIGEKHHQSRKQHKKVKLAWRTNRPDAKRKSLGWIPFKASAVKVLRTYNTGKTALKSQVQLSCGKEKLILTVYDQYDLRRYSGFRTAEIVQDSCGDWYLCLLVKVEPKICTAIGEVGIDYGCKTAATCSNGDKLETKFTRQYAEKLATAQRARKKKQARRIHRKIKNSRADATHKFTSKLVRENRLIIAGNVKSSSFTSGKLAKSVYDANWFAINRQLEYKSRRAGCQFIVVDENFSTQTCANCLQITNSSPKGVAGLGIREWICDCCGQLNDRDVNAARNILRFGRETLAEGSPVF

SEQ ID NO: 2456 - protein, 347 aa, unidentified
  REGION 1..347: note = Category: MG81 effectors
  REGION 1..347: note = Description: MG81-739 effector
  source 1..347: note = uncultivated organism sequence
MLQVQLKLRPCKAQEQIYDQWLYNLASVYNFAVRKIELNAKDKIYFSKNDFQNLLANHGEKLGIPSHTIQGVLCTVHDAWKRCFKKTAGKPKLKGMRNKMSSIPFPDPIKAPKGNRITLPGLGSVRFHKQEISEGKIKCGRLIKRASGWYLCLFIDAEPNPIKRLAFGAIGIDPGFSNLLTTSDGEVIEHPRELEAAAERLGQAQRGHNKQLAARIQERIANRKKDRNHKLTTKLVSENVLIVWSKDAIKGIAKRFGKSVNSSSHAQIRQMLSYKMPKSGGTFIEVASKYSTKTCNECGNPTGPTGLAELSVRRCSACGAEHDRDVNAARNTLFAGAGCAHEELAYV

SEQ ID NO: 2457 - protein, 365 aa, unidentified
  REGION 1..365: note = Category: MG81 effectors
  REGION 1..365: note = Description: MG81-740 effector
  source 1..365: note = uncultivated organism sequence
MDNQLPTKTLKLRIRDKHSNFLLAQSKEVNLVWNYVNDLSMQILKREQRFCSAYDLSKYTAGATKAGLSLHSQTVQAIGDEFVTRRKQFKKVKLKWRKSGGSKRSLGWIPFKSSAIRYKNGQVFYCGKAIGLWDSYGLSKYQLGTGSFSEDSRGRWYLNVTVKVNQKTESGGQLTGVDLGCKEAATASDGSQVHGRRYRALEQKLALAQRARNKYRIKNIHAKIKNQRKDDLHKFSSALVKRSGAIFVGNVSPTGMAKTKNAKSSLDAGWGILKSMLEYKCRWADVVFGEVNEAYTTQTCSCCGSISSSSPKGRADLGIRSWTCVVCGTHHDRDINAGINIAKRGESQFLVGAGHCPPVVGIPVL

SEQ ID NO: 2458 - protein, 347 aa, unidentified
  REGION 1..347: note = Category: MG81 effectors
  REGION 1..347: note = Description: MG81-741 effector
  source 1..347: note = uncultivated organism sequence
MLLAYRYRVKSLEGLLKAQSRAVNFVWNYCNETQKSALKWNKRWPSGFDLNKLTAGTSKELRLHAGTINSVCEQYANSRSQKKRPYLRWRGKKSLGWVPLKGRDLRREGDAFRFAGNTFRVFYSRPLPDGKIKDGTSFSCDARGRWFLNIVIEVAAATPRQVAAAIGIDLGLKDFAALSTGETIGNPRHLRKLAVDLAIAQRAGKKGRARSIHAKISNARADFHHKLSFRIVREFDYIAVGNINAAGLAKTNMAKSVLDAGWSSFRNQLRYKAIKHGAWFAEVSEYGSTRVCSSCACETGPKGVKDLGIRIWICSECGTSHDRDTNAALNILFRSGHRTPVEGIPVL

SEQ ID NO: 2459 - protein, 390 aa, unidentified
  REGION 1..390: note = Category: MG81 effectors
  REGION 1..390: note = Description: MG81-742 effector
  source 1..390: note = uncultivated organism sequence
MKSNNTLMPPLLMRTLRLKVRSEAYPWLNAAAIEVNAVFNYCNETSYKAATRTDLKRKWLSGFDLCSLTAGASQYFEKIGSDTIQSVCVQYAQNRKAAKKLKLKWRVSRGAQRSLGWIPFKAAALKRKGRGVRFAGKCIRVFERERLEGAKWQGGEFAQDSVGDWWLCLPVKVQAEETIAPQEAVGIDLGIKCIAATSDGDRLEAGRWTRRYAEKLASAQRRGHKRQAKRIHRKVARCRADALHKFSRTMVDRYQHIVVGDVSSLKLVKTRMAKSVLDSGWGTLRRFLAYKCEHAARGFEVTDERYTTVTCSHCGALSGPRGVNGLIVRFWVCRNCGELHDRDVNSARNTLIGSRCRTSVCGNKLSYSLISPSNAYRVREAEIELARTAA

SEQ ID NO: 2460 - protein, 351 aa, unidentified
  REGION 1..351: note = Category: MG81 effectors
  REGION 1..351: note = Description: MG81-743 effector
  source 1..351: note = uncultivated organism sequence
MKTFKFRLKRRNTAKLEKMAGAVNFVWNYANQTSVEYLDKFGKWLSGYDLNYLTVGCSKDLGINANSVQFVCEELAKRRKQSRRRKLSWRSQKRSLGWVPFKQDGILIKDDVITYYGNQFKFWKSRQIEGKIRGGSFTQDSKGNWYINIVCEVPRSIRIADNREVGIDLGLKTLATLSDGNKIDRFNITDKYADRLAMAKRANKKKRATAIHAKIKNTRKDFNHKETTKLVNNYGKIFVGDVSPSKLMKTNMSKIVTDVSWCDFKSMLAYKAIALGVEYKEVKENFSTVTCSTCFERTGPSGLSALGVREWTCKCGATHDRDVNAAKNILRFGHETPIKGSPYYKRNVSKR

SEQ ID NO: 2461 - protein, 511 aa, unidentified
  REGION 1..511: note = Category: MG81 effectors
  REGION 1..511: note = Description: MG81-744 effector
  source 1..511: note = uncultivated organism sequence
MREDSQNTCCLTLPLKIEKWQADRLIKRFEIARQIYNTLVHAELKKLQKMEASAEYRQIQDRIRELNPSDVRAKKEWKILKDKQEKLWKAWKITEYGFKSDIKAYYKYFNENIGSAVATHDIAPRVWAAFEKKLNDRTGKVKIQYKKAGDIRSLKGFSVSGKSGGTEIIFHKTYIAWKGLTLPLKLSPDNAYEKEMLMRRIKYVRILRKPGKHKDRWYAQLSLEGNPVVKLDPVSGLPRHPIGKGAVGIDIGPQTLAYSAEGGADLVELADQVQCIEQEKSRLQRKMDRSRRASNPDNYAQDGTIKRGVKLTHNKSRRYCKLQKELAYMLYRQAETRKRQHRELINRLLTMGDCFYIEDMHWNSLAHRAKKTEISEKTGRYKRKKRFGKSIANKAPAMLVDMLEQKCKSLELDVVMVNTSLKASQYNHQTGKYEKKTLSQRWNHMPDGEQIQRDLYSAFLLQHVVPEKNAFDNEALCRDYPKFVQYHHEVIERLRSLPKTISSMGIRQSVS

SEQ ID NO: 2462 - protein, 353 aa, unidentified
  REGION 1..353: note = Category: MG81 effectors
  REGION 1..353: note = Description: MG81-745 effector
  source 1..353: note = uncultivated organism sequence
MKQTKTLRVRVRDKHAPLLRQMARSVNFVWNYLNELSWRAIRERGVFLSAFDLHPYTKGAGKELGLHSQTLQCIAAEYVTRRKQFKKSRLRWRKSGGARRSLGWIPLNTGAASWKHGQVFHNGHHFKVWDSYGLGDFRFRSASFSEDARGRWYFNIVVDVGTQLGTGQGVIGVDLGLKDVATCSDGRKLENGRFYRDLEAKLAVAQRAGNKERARAIHAKIANRRKDALHKFSRQLVNQHAEIYVGDVSSQKLTQTRMAKSVLDAGWGQLKAMLAYKCAHAGIVFKVVDERYTTQTCSCCGAKPDSRPRGIAGLGIREWTCSECGVTHDRDINAARNILAAGRGRPVVGIPVL

SEQ ID NO: 2463 - protein, 397 aa, unidentified
  REGION 1..397: note = Category: MG81 effectors
  REGION 1..397: note = Description: MG81-746 effector
  source 1..397: note = uncultivated organism sequence
MAAPVNAPHTTRVLRLRLKDRHADALRALAGEVNFVWNYCNELSTKGFQRERRFIGAYELHKYLSGAGKDGLQLHSQSVQAVADEFARRRKQFKKVKLRWRVSRGARRSLGWVPFKASAIQYKNGQVHLAGTPLSLWDSYGLSRYELGAGNISEDARGRWYLNVTVKSPGWPKSRNLEQVQGDAVGIDLGLKDFLATSEGELVEAQRFYRDLEPALAGAQRAHRARRVKALHAKIANRRKDFLHKLSTGLVRQHQAIFVGDVNARALARTTMAKSVLDAGWSAFRTMLQYKCDDAGVWFSEIDEKFSTQECGACGARTGPRGREGLSVRSWECSRCGTQHQRDVNSATIIRNRGLVWLEKAFSTPGEARADEAGVNEGALRAPAAGHGRPDVGIPAL

SEQ ID NO: 2464 - protein, 512 aa, unidentified
  REGION 1..512: note = Category: MG81 effectors
  REGION 1..512: note = Description: MG81-747 effector
  source 1..512: note = uncultivated organism sequence
MPTKQKEDSNRCVLTLPLLTEPWQEHIIEKRFKIIEHLKNQLISIELRKLKKLQRTKAYKNLIKQIESVPKSERTVLYKERNKMLKDAGFSQYTFMDDMAGKKSLMQKHFESHINVQIAHKAAIDVWSSFEKFLFGTGQIVHYQKRGTLSSVASKSPKTGMFYYPDENIFKWSGGGTKPKGGIILCLRVASVKTNYEKEMVANNEIKYYRVVRKWMKTKYKYYLQITFAGKPADKHREISTGRVGIDIGTQTIAIASDKSVKLLELADKVNKNHIKKCELQRKLDRSRRYTNPDNFNPDGTVKRGTKGHKLKWNKSKHYLEIAGKIRELERKNADIRKYQHTCLANDILAMGNQIYIEPMNYKGLQKRAKETQVDEKGRYKKKKRFGKSLANKAPAMFVTILKTKAEQHGGEVYEVDIMSYRASQCDHTTGEYTKHGLNDRWRILGNGDKVQRDLYSAFLIKNSNKTHDEIDLDKCSKTYDSFKKLHDKEIENIRNEVILRKRRNISSYGIA

SEQ ID NO: 2465 - protein, 349 aa, unidentified
  REGION 1..349: note = Category: MG81 effectors
  REGION 1..349: note = Description: MG81-748 effector
  source 1..349: note = uncultivated organism sequence
MLQVQLKLRPCKAQEQIYDQWLYNLASVYNFAVRKIELNAKDKIYFSKNDFQNLLANHGEKLGIPSHTIQGVLCTVHDAWKRCFKKTAGKPKLKGMRNKMSSIPFPDPIKAPKGNRITLPGLGSVRFHKQEISEGKIKCGRLIKRASGWYLCLFIDAEPNPIKRLAFGAIGIDPGFSNLLTTSDGEVIEHPRELEAAAERLGQAQRGHNKQLAARIQERIANRKKDRNHKLTTKLVSENVLIVWSKDAIKGIAKRFGKSVNSSSHAQIRQMLSYKMPKSGGTFIEVASKYSTKTCNECGNPTGPTGLAGLSVRQWECNVCGAQHDRDINAAINTLAAAAGCAVEGYAYV

SEQ ID NO: 2466 - protein, 413 aa, unidentified
  REGION 1..413: note = Category: MG81 effectors
  REGION 1..413: note = Description: MG81-749 effector
  source 1..413: note = uncultivated organism sequence
MESSHARTFMLGWRLLRRPRKAMQPQDPTRPRIHSVTRTLRLKVKTESYAWLNTAAYEVNQVWNWSAEVSEKAARPCTGERKWLTGFDLNNLSAGASEYFDKIGADTIQRVNGEYAEQRRIAKRIRLRWRTSRGPRRSLGWVPFKAASLKRKGRSLRFCGKTFRVFEPERLEGVKWRQGEFAQDAVGDWWLCLRIKIQVEESVAPLEKVGIDLGLTEVAVTSDDARCEKSCFYRGIEQKIAQAQRRGHPRQAKFLHRRAANRRKDALHKFSRRIVNEYEKIVVGDVSSTQLVKTRMAKSVLDAGWGMLRTYLQYKSQQAGRTFQIVNERNSSRTCSNCDALTGPQGVNGLRVRRWTCAACGVSHDREVNAARNHLRRAELPASVRKRVIVLAGSAEPSIPLAQGRTEPVRTVA

SEQ ID NO: 2467 - protein, 378 aa, unidentified
  REGION 1..378: note = Category: MG81 effectors
  REGION 1..378: note = Description: MG81-750 effector
  source 1..378: note = uncultivated organism sequence
MHGASCTKTKVLRLRLKDKHAMFLRHLAGEVNFVWNYCNELQITMFNRERRFLSGYDFAKFTRGATKEGLHLHSQTVQAIAEEYATRRRQCRRVRLSWRKSTGRRRSLGWIPFKKTAIQAAHGQVKFAGRWLSLWDSYGLDAYPIRAGTICEDARSRWYLNACVAVPVAEPRSSARRDVGIDLGLKDLVATSDGEKVSAPQFYRGLEPKLAIAQSAGKKDRVRAIHAKIANRRKDSLHQFSTRLVRGYDTIFVGNVNTSALAKTSFAKSVHDAGWSAFRTMLRYKCDFAGATFAEVNEAFSTRTCSACDSRSGPKGIAGLGIRAWKCSKCGAVHDRNVNAAKNILAAGRRRLAEGIPALLGRGRTSNCGETVRRTILC

SEQ ID NO: 2468 - protein, 351 aa, unidentified
  REGION 1..351: note = Category: MG81 effectors
  REGION 1..351: note = Description: MG81-751 effector
  source 1..351: note = uncultivated organism sequence
MIQVQLKLRPNVKLEKRLDEWLWHLTGVYNWAVRKIQLDADDKIYHSPMNFQNLLAGHAKKVGVPGHCIQGVLSTVHAAWQRCFRKQGGRPKLKGQRNKLVSIPFPDPIRCPEGSHVKLPVLGLVRFHKQFLPEGRIKCGRLIKRASGWHLCLFIDAAPKEIERVGFGKIGIDPGFKSLLTFSTGEKVEHPRELEASAKRLAQAQRGKDKKLVARIHERIANQRKDRNHKLSRKLVAENTVIRFSKDNIKGIAKKFGKSVTSSGHGQLRAMLAYKSSHIGGTQYDEPASKNSTRICSNCGCLSGPTGWAGLSVRNWVCQECGSLHDRDQNAAINVLNFGAGTALERGLCQI

SEQ ID NO: 2469 - protein, 556 aa, unidentified
  REGION 1..556: note = Category: MG81 effectors
  REGION 1..556: note = Description: MG81-752 effector
  source 1..556: note = uncultivated organism sequence
MATRKKHIRTPYEDERKKHRAAASRHVLALEAQIKEDDKRKLFHIANDLRVYGNHLTNIAQKRVSQLFRTKAYREALKQYHNASSVLSSLDKGTPKYHEAKEKVKDAADVLERLQAQYKLTMEDLRHDMAGISKGGKIKAVFLLSETENVWAAVQSVLYKSGKHLNYAKRGELPLIRAKQIERGITLSFVNGVPRCKMGAIDDFALIVKKNDSFAKNELACIEAFVSDLETEKKAVAIFSKTGIPQNTYRPCFVALKCVTIRGKLRVYAHITVEGDPIPKYTKSGCLKHPCGKGLVGVDLGPQSVAAVSETSVILENLAERNGKSTKRHERKERLFLRALDRSRRANNKDRYNEDGTVKKGVHKPWKKSKQYRIKEACLKELRRKNALSRKYANNELANRIRAMGDDITIERSNVKALQKKAKPSVPEQGKKQKRRKRFGHSILHRCPGHLYAQLHSKFSENHFHVVDNMYRASQYDHKSNSYNKKKLSQRWHKFEDGTKVQRDIYSAFLLLCHNDDFKTINQDICILKYETFKKAHDKCISDIKTSGQKVCNSGI

SEQ ID NO: 2470 - protein, 383 aa, unidentified
  REGION 1..383: note = Category: MG81 effectors
  REGION 1..383: note = Description: MG81-753 effector
  source 1..383: note = uncultivated organism sequence
MPLSFTRTLRLKVRRESYAWLNAAAVEVNEIFNYCNETSLKAATRTDLKRKWMSGFDLCNLTAGSSQYFDKIGADTIPSICTHYAQKRQAAHRVKLRWRVSRGTRRSLGWVPFKAASLKHKGVCLRFAGKCFRVFERERLEGVKWQGGCFAQDAIGDWWLCLPVKVAAEETVAPEQAVGIDLGLKDIAATSDGGRLRAGHWTQEYAQKLAAAQRCGHKRQAKRIHRKVARCRTDALHKFTREIVDRYQKIVVGDVSSLKLVRTRMAKSVLDSGWGMLKRFLEYKSQQAARTFEVVNERNTSITCSTCGALSGPRGANGLIVRSWVCRDCGELHDRDVNAARNILIGSRYRTSMRGNESSPWLIPPSNAYCVREAGMESAWAAE

SEQ ID NO: 2471 - protein, 367 aa, unidentified
  REGION 1..367: note = Category: MG81 effectors
  REGION 1..367: note = Description: MG81-754 effector
  source 1..367: note = uncultivated organism sequence
MIQVQLKLRLRPAQERQLERWLFRLTGVWNWAIRKLEADGNVGVRHSVFEMKALVNGHGRKIGVPSKAMTALVAQACDAYDRYRGGLANRPRLKGRRNKLNSIPFDQGQLIRSDRSVYLAGLGLARFHPQEIPAGHSGCSRIVKRASGWYLCLFIQAEREPIAVVVDGLIGVDPGFSNLLTTSDGEIIEHPDELRAGELRVAQAQRGKRERLSARLRERGANRRRDRNHKLSRRLVAENRLIVWSKDNTAGIARSFGKSVSSASHSQLRQMLAYKSRAGGREFVEVASRNSTRICSACRAITGPTGYAGLSVRRWTCVCGATHDRDVNAAVNTLIAGLGMSHERSREVASGIVIESKPTRFMRGASQ

SEQ ID NO: 2472 - protein, 512 aa, unidentified
  REGION 1..512: note = Category: MG81 effectors
  REGION 1..512: note = Description: MG81-755 effector
  source 1..512: note = uncultivated organism sequence
MPTKQKEDSNRCVLTLPLLTEPWQEHIIEKRFKIIEHLKNQLISIELRKLKKLQRTKAYKNLIKQIESVPKSERTALYKERNKMLKDAGFSQYTFMDDMAGKKSLMQKHFESHINVQIAHKAAIDVWSSFEKFLFGTGQIVHYQKRGTLSSVASKSPKTGMFYYSDENIFKWSGGGTKPKGGIILCLRVASVKTNYEKEMVANNEIKYYRVVRKWMKTKYKYYLQITFAGKPADKHREISTGRVGIDIGTQTIAIASDKSVKLLELADKVNKNHIKKCELQRKLDRSRRYTNPDNFNPDGTVKRGTKGHKLKWNKSKHYIEIAGKIRELERKNADIRKYQHTCLANDILAMGNQIYIEPMNYKGLQKRAKETQVDEKGRYKKKKRFGKSLANKAPAMFVTILKTKAEQHGGEVYEVDIMSYRASQCDHTTGEYTKHGLNDRWRILGNGDKVQRDLYSAFLIKNSNKTHDEIDLDKCSKTYDSFKKLHDKEIENIRNEVILRKRRNISSYGIA

SEQ ID NO: 2473 - protein, 372 aa, unidentified
  REGION 1..372: note = Category: MG81 effectors
  REGION 1..372: note = Description: MG81-756 effector
  source 1..372: note = uncultivated organism sequence
MNHTKTLKVRVRDKHAPLLREMARSVNYVWNYLNELSHRSIRERGVFLSAFDMHPYTKGAGKELNLHSHTLQCVAAEYAARRKQFRKPRLNWRKSGGVRRSLGWIPINTGAASWKNGQVFHNGHHFTVWDSYGLGQYRFRSGSFSEDSRGRWYFNIAVDVPEFVGPLQQTESIGIDLGLKEVATCSDGFTRLENARFYRGLEPALAIAQRANKKARIRAIHAKIANRRKEALHQFSRSLLKRCGMIIVGDVSPQKLVKTTMAKSVLDAGWGQLKTMLDYKCAHAGIVFKVVNEAYTTQTCSCCGAISSSSPKGRAGLRIREWTCECGVTHDRDVNAARNILALGLSVPQGESTSFRTGRKSKIRTEGHSRDS

SEQ ID NO: 2474 - protein, 380 aa, unidentified
  REGION 1..380: note = Category: MG81 effectors
  REGION 1..380: note = Description: MG81-757 effector
  source 1..380: note = uncultivated organism sequence
MLQVQLKLRPCKAQEQIYDQWLYNLASVYNFAVRKIELNAKDKIYFSKNDFQNLLANHGEKLGIPSHTIQGVLCTVHDAWKRCFKKTAGKPKLKGMRNKMSSIPFPDPIKAPKGNRITLPGLGSVRFHKQEISEGKIKCGRLIKRASGWYLCLFIDAEPNPIKRLAFGAIGIDPGFSNLLTTSDGEVIEHPRELEAAAERLGQAQRGHNKQLAARIQERIANRKKDRNHKLTTKLVSENVLIVWSKDAIKGIAKRFGKSVNSSSHAQIRQMLSYKMPKSGGTFIEVASKYSTKTCNECGNPTGLAGLSVRQWECNVCGAQHDRERRYQHPCCCGRMCRRGLRLCVAVQESQTSSLGASNTSLMFSYIRILSRENFNDVKH

SEQ ID NO: 2475 - protein, 347 aa, unidentified
  REGION 1..347: note = Category: MG81 effectors
  REGION 1..347: note = Description: MG81-758 effector
  source 1..347: note = uncultivated organism sequence
MIICHKYRVKSLTGFLNFQAKSVNFVWNYCNDIQRHALKWGKQWPTAFDLIKLTSGSSLHLGILAKTIEGVCQKYATSRGRCRKRFLRYRGQKSLGWVPISKSSLSILEGGFKFSGKLFRVFDSRQLPPDAKIKDGSCFSKDARGNWFLNIVIEIADLSCREITKGVGIDLGLKEFATLSTGEKINNPHHFRALEESLAKAQRARKKRQAANIHARISSARHDFHHKLSTRIIREFDYIAAGNIKAAGLAKTSLAKSINDAGWSSFRNMLRYKAIGRGAVYEEVSEYLTTQTCHECGSIAGPKGQTGLNERTWICTCGAVHDRDHNAAINILMRGSGHGTPVEGIAV

SEQ ID NO: 2476 - protein, 426 aa, unidentified
  REGION 1..426: note = Category: MG81 effectors
  REGION 1..426: note = Description: MG81-759 effector
  source 1..426: note = uncultivated organism sequence
MIVLAIALDEIGFEILAHAAEDRPQVFDGPIRQHVASVFGDKDQMDVHLENAMSAGPVVLHFALRPIMFRGMMLTFKYRVKDATVGKHLNRHAWACNQVWNFCVATQREAQRRRQAGLTVRWPSAFDLVKLCTGSGTELGLHSDTVQTICRQFAASRDLHKRCPRFRASGGPKRALGWVPFIPRAVKVDGAHVVYLKRKFHFWKSRDIDGEFKAGSFVQDARGRWYVCFQCEVAEDRPTGNGEIGIDLGLKTLATCSDGTSIPALRHYRQYEAALARESRAGNKRRVRAIHAKIANARRNHLHEWSTKLARENELIVVGNVSPSKLAKTKMAKSILDASWAMLRSQLEYKARRHRARFVEADERWTSQSCSDCGAVGGPKGIAGLGVRHWTCPCCGSSHDRDVNAARNILSVGAERRPPAVEIPVL

SEQ ID NO: 2477 - protein, 366 aa, unidentified
  REGION 1..366: note = Category: MG81 effectors
  REGION 1..366: note = Description: MG81-760 effector
  source 1..366: note = uncultivated organism sequence
MTEDNTVLKTLKVRVKDNRKNILNRMAFDINQVWNKANEITSEECYEPIPEVGYVFNNISAFDIQKRIKGIRKERDMIIGAGSAQKIIAIHAKARKQFEKVKLKWRTSGGSRKSLGFVPFKSGAIKWVNGQIRFCGYYFKVWDSYGLSKYDFRSGSFSQDARGRWYLSIVVKVQQEKSKGTGQIGIDLGLKTTAVCSDGTTLERKQYYRNMESKLAMAQRANKKKQVKNIHAKIKNRRADTNHKFSTKLVKENSLIVVGNVSSSKLAKTKMAKSVLDAGWYQLKSMLDYKSKGMQVCYVEVNEAYTTQACSCCGCISSNSPKGMDSLGIREWTCAECGTKHDRDINAAENILRLGHQTLAGGIPRF

SEQ ID NO: 2478 - protein, 338 aa, unidentified
  REGION 1..338: note = Category: MG81 effectors
  REGION 1..338: note = Description: MG81-761 effector
  source 1..338: note = uncultivated organism sequence
MKLLTYKYRIKDSTSKKRLEKMARSVNQVWNYCNEVSILALKSKFVFLTAFDLNKLTTGVSKELGINVETVQATCEEYATRRKQFKKQKLKWRSSKKSLGWVPFKARSIKYLGNGEVKYFGHVFKFWESRSPLNIKCGSFNQDSKGNWHLNLVCEVEDDFLESTGKSVGVDLGLKDLATYSNGEKFSGVKATKKYADKLAKAQRARKKKQVTNIHKKIANIRKDSLHKETSRLVKQYDLIVVGDVSSKKLLKTNMAKSVSDASWDTYKSMLLYKTIRFGKELKVVNESWTSKTCHVCNTVANFGGLSGLSVREWTCSSCNTTHDRDVNAAKNILRLGQ

SEQ ID NO: 2479 - protein, 377 aa, unidentified
  REGION 1..377: note = Category: MG81 effectors
  REGION 1..377: note = Description: MG81-762 effector
  source 1..377: note = uncultivated organism sequence
MEVEIANCIRTLRLKVKPEAYASLNAAAVEVNRVWNFANETSAKAARPFAGPPKWLSAYDLDKLTAGATKYFERIGSETIQRVNAEFATRHKQVKKTKLRWRSSRGSRRALGWIPFKAVQLKRKGTSLRFSGKAFRVFEQACLSEVKWKCGCFSQDAVGDWWLSLPVEVRAEPTVAQNEEVGLDLGLKNTVATSDGDKLEASNFYRNIEQKISQAQRRGHKRQAKRLHRRAARRRKDTLHKFSRKIVNRYQRIIVGDVSSAKLVKTRMAKSVLDAGWGMLKAQLQYKANQAGKCVFIVSERNTTRACSNCRALTGPAGLDMLAVRAWVCSGCGGTHDRDVNAARNIRFAARCSPSVSGNEPSPSDTPPSQASRLREA

SEQ ID NO: 2480 - protein, 386 aa, unidentified
  REGION 1..386: note = Category: MG81 effectors
  REGION 1..386: note = Description: MG81-763 effector
  source 1..386: note = uncultivated organism sequence
MFDETVYIDRAEAVLSARAPALCESPMKPDNAPETHIQRQTITFKFRLRDRHAAELNRQARAVNYVWNYVNETQQKAARAHRKWLTAFDLQRLTNGASKELDIHAHTIQRVCRAYDDARKTHKKAWLRWRGRKSLGWVPFNTGHVSFDGADFKFRGVAYTPMHLRDLKPGVKIGAGSFNQDACGHWFLNIPVEVECALSAPLSSVGIDLGLHTMATLSTGEKIEAPRLYRASEEKLGTAQRARKTKRARAIHAKVANRRKDFLHKASAKIAKQFGLIIVGDVSPSKLAKTNMAKSVLDAGWSGFKNMLSYKANYRGGAMVEVSERYSSQTCSACGSLPPSRPKGIAGLGIRRWTCDECGAIHDRDVNAARNIVRAGLRTLVGGAHV

SEQ ID NO: 2481 - protein, 351 aa, unidentified
  REGION 1..351: note = Category: MG81 effectors
  REGION 1..351: note = Description: MG81-764 effector
  source 1..351: note = uncultivated organism sequence
MILTYKYRIKNRNAKSALRRHVFAVNQVWNYCCAQQRDTESRYRAGAPKRKWASHYDLTRLCKGAGAMLGIHQQTVSGVCRTFAQARDKAKHAPAFRKSYGVKRSLGWIPFEGQSRQIKDGVVTYLGKRFYLWGLKRRPLPATVKGGAFVEDALGRWYVCLTVEIERKPATGDKAIGIDLGLKSFATLDDGRKIEAPRIYRRYEQRLAALQRAGKRCHTKRLHAKIKACRADFLHKVSTELAGQNAIIAVGNVNARALASKSVLDAGWSSFRKMLAYKANDYREVDEKFTTQDCSACGARCGPKGQKGLGIREWECSSCGVSHDRDVNAARNILALARSAPRPVEEYRRAA

SEQ ID NO: 2482 - protein, 339 aa, unidentified
  REGION 1..339: note = Category: MG81 effectors
  REGION 1..339: note = Description: MG81-765 effector
  source 1..339: note = uncultivated organism sequence
MELRECFQVWRRQRVFLSAYDIHEYTKGAGEELGLHSQTLQVVGETHAKARKQAKRSKLRWRTNRKDAKHKALGWIPFKSSAVKVIRTYTTGQKVLKSQVQLSCGKEKLILTVFDQYDLRQYTEIKTASVVEDSCGNWFLCLVVKIEPAIENTATDEVGIDLGCKTAATCSNGDKLETKFIQQYAEKLAIAQRAHKKNRAKRIHRKIKNKRTDATHKFTSRLVKENRLIVVGNVKSSSFTSGKLAKSVYDANWFAINRQLEYKCEHAGCLFIKVNENFSTRTCSHCLAMPDSAPRGIAGLGIREWICNCCGHLNDRDVNAAKNILRFGRETLAEGSPVL

SEQ ID NO: 2483 - protein, 362 aa, unidentified
  REGION 1..362: note = Category: MG81 effectors
  REGION 1..362: note = Description: MG81-766 effector
  source 1..362: note = uncultivated organism sequence
MIVLTYKYLVKGKRAKRQLRRASWAVNQVWNFCGQTQRSVQRAWKDGLSPRWPSRFDLAHLAAGTSKDLGIHGQTIQCVAAQFAKSRDQHRKCPRFRHSGGPKRSLGWVPFQAQSRQIEGNAITYLGTTYRFFASRPLPLIVKGGAFVEDARGRWWVCFHVGVANDLPAAPDVAVGIDLGLKTLATLSTGEKYEAPRHYRVWEDRLAVAQRANDKDRARAINAKIKNCRHDATHKWTTEVARNFRMIYVGDVSSSRLVKTRMAKSIYDAGWSGSKHALRYKASRHGGTCVEQDERLSTQICSSCGMLCETRPRGIADLGMREWVCSNCGTHHDRDVNAAKNILAFGLSAQPPVEESRVAHGR

SEQ ID NO: 2484 - protein, 538 aa, unidentified
  REGION 1..538: note = Category: MG81 effectors
  REGION 1..538: note = Description: MG81-767 effector
  source 1..538: note = uncultivated organism sequence
MDNEEKEKDGATCCLTLPLKLEKWQSDHLEKRFEIARQLYNTLVHAELKKKCQVERMPEYQEIMKMIDTASNQKEKWALEKKRKAFLEENGFSRNAFKADMEKYYKHFNDNIGANVALHGITAQVWIAFDKVFVDNYKQKGKVHFKKPGELCSVQGYSQKKSGGKEIMFREDRIIWNQQGNRDRKKVKREFLLKLSPDNPYEAEMLKRHVKFVRILRKDGKTKPHWYAQLVLEGKPAVKRDPASGAPKHPIGHGVVGIDIGTRTLAYSTDKEVNLLELADRVQNIEQEKRRLQRKMDRSRRATNPENYNPDGTFKRGVKLTRNKSKRYKRIQHQYAMIQHHQADIRKQQHNELANYLLTLGDCFFVENMSYCDLVHRANKTEISEKTGRYKRKKRFGKSIANKAPAMLITMLKQKCQSRGLEGVKEVDTHVRASQYNHQTDTCIEKALENRWNVMPDGERIQRDLYSAFLLQHCRRDLPEYNRKELQKEFGEELYRVFDREALQRDYPQFVAYHHMTIQRLSELPHTIPSMGIRRIIS

SEQ ID NO: 2485 - protein, 355 aa, unidentified
  REGION 1..355: note = Category: MG81 effectors
  REGION 1..355: note = Description: MG81-768 effector
  source 1..355: note = uncultivated organism sequence
MVTTIKLRLKDKHSTDLSRQSRTVNFVWNFVNETQRESVRRYRLGASGKFLSKYDYAKLCYGTGKELSVASGTIEEITRQYETSRRTHRKPWLRWRGRKSLGWVPFRGRQIRFDGEQFIFAKRKYRPMHLRDTLTPETKVLTGSFNADARGRWYINVTVELPDDTHPRAPDVPVGVDLGLKDLATLSTGAKVHNYKPYREREEELAKAQRANKKKRVRAIHAKIANSRKDTLHKASTEIARNHSLIFVGDVSSKQLARTRMAKSVLDAGWYDFKSMLTYKAIRHGGRMVEVDERYTTQGCSHCGLVGGPKGAKDLGMREWTCSGCGTNHDRDVNAARNILRVGTDTLEGGASNQS

SEQ ID NO: 2486 - protein, 522 aa, unidentified
  REGION 1..522: note = Category: MG81 effectors
  REGION 1..522: note = Description: MG81-769 effector
  source 1..522: note = uncultivated organism sequence
MKRSSTDTCCLTLPLKLEKWQSDRLEKRFEIGRQIYNTIVHAELKKLRKLERTQQYQEIEQKLENAKQEETKELWKKKRQLLDQNGLSENHFKADMKYYYPHFKDNIASSVAVHGIASQAWTAFEKVLFSKDGKMVHFKKKGELSSLRGYSQAGKSGGIEIIFRGSYVEWKGLKLPLKLSPDNDYETEMLSKRVKYVRILRKEGKTKPHWYAQLVLEGKPAIKRDPASGAPKHPVGHGVVGIDIGTRTLAYSADSKVDLIELADRVQNIEQEKMLLQRKLDRSRRATNPENYKPDGSIKQGVKLTWNNSKRYKRIQHQYAMIQHHQADIRKQQHNELANYLLTLGDCFFVEDMDYRALTRKAKKTEISEKTGRYKRKKRFGKSIANKAPSMLIALLDQKCKSLNLEGVKKVDTAVKASQYNHQTDECKAKELKERWNIMPDGERIQRDLYSAFLLQHCRRDLPEYNRKELQKEFGEELYRVFDREALQRDYPQFVAYHHMTIQRLSELPHTIPSMGIRRIIS

SEQ ID NO: 2487 - protein, 538 aa, unidentified
  REGION 1..538: note = Category: MG81 effectors
  REGION 1..538: note = Description: MG81-770 effector
  source 1..538: note = uncultivated organism sequence
MNNEEKEKDGATCCLTLPLKLEKWQSDHLEKRFEIARQLYNTLVHAELKKKCQVERMPEYQEIMKMIDAASNQKEKWALEKKRKAFLEENGFSRNAFKADMEKYYKHFNDNIGANVALHGITAQVWIAFDKVFVDNYKQKGKVHFKKPGELCSVQGYSQKKSGGKEIMFREDRIIWNQQGNRDRKKVKREFLLKLSPDNPYEAEMLKRHVKFVRILRKDGKTKPHWYAQLVLEGKPAVKRDSASGAPKHPIGHGVVGIDIGTRTLAYSTDKEVNLLELADHVQNIEQEKRRLQRKMDRSRRATNPENYNPDGTFKRGVKLTRNKSKRYRRIQHQLAMIQHHQADIRKQQHNELANYLLTLGDCFFVENMSYCDLVHRANKTEISEKTGRYKRKKRFGKSIANKAPAMLITMLKQKCQSRGLKGVKEVDTHVRASQYNHQTDTCIEKALENRWNVMPDGERIQRDLYSAFLLQHCKQGLPEYNRKELKKEFGEELYRVFDREALQRDYPQFVAYHHMTIQRLSELPHTIPSMGIRRIIS

SEQ ID NO: 2488 - protein, 578 aa, unidentified
  REGION 1..578: note = Category: MG81 effectors
  REGION 1..578: note = Description: MG81-771 effector
  source 1..578: note = uncultivated organism sequence
MAFGSKNSTPSFVLTLPLDISLNEQDYLYKEFKKCGTIYNQLVSVTTKMWHQLRKMRKYRELMAAIAKAAPDSDEQKVLFKQREKMLKEYRFSEDAFHKLVVPYARHYAINSHIAQAVASDVWKAWNTFFFSKGKEVHYKRLDDLAAISGKNNFTGIVLRPANFTTSNIESAKRKAQKAVEKRYDDMYGRPDPKDDKKVVLPDEVKPQMEAEIAAAIAKIKPTIGKGNLRIVYGKHEFPVVLRNPKTQTGKYQQEALKCGVKYCRITRKWVKTKWKYYAQFILEGYPPTKCDGNGVMKHPVNQGRIGLDIGTQTLAISGKDICDLRVLAPSARAQARGLTNQIARTQRAMDRSRRVTNPKYYNPDGTIKRLKRQHGHKQRRDWKYSKRYFRLKAKLRDLNRRLADIRKMEHNILANELLQHGNEFVVEDMNYKALQKRSKETKTNAKTGRAHTKKRFGKSLSRCAPAMFISILNKKANRYGGSVIKVSTFETKASQFDHTDESYTKKRLSERMAHLSSGEVVQRDLYSAFLLEYIDTESLEYNTKALNSAFPAFLVMHENTIKHLQKDKSYLPASVGF

SEQ ID NO: 2489 - protein, 482 aa, unidentified
  REGION 1..482: note = Category: MG81 effectors
  REGION 1..482: note = Description: MG81-772 effector
  source 1..482: note = uncultivated organism sequence
MPEYQEIMKMIDTASNQKEKWALEKKRKAFLEENGFSRNAFKADMEKYYKHFNDNIGANVALHGITAQVWIAFDKVFVDNYKQKGKVHFKKPGELCSVQGYSQKKSGGKEIMFREDRIIWNQQGNRDRKKVKREFLLKLSPDNPYEAEMLKRHVKFVRILRKDGKTKPHWYAQLVLEGKPAVKRDPASGAPKHPIGHGVVGIDIGTRTLAYSTDKEVNLLELADRVQNIEQEKRRLQRKMDRSRRAMNPENYNSDGTFKRGVKLTRNKSKRYRRIQHQLAMIQHHQADIRKQQHNELANYLLTLGDCFFVENMSYCDLVHRANKTEISEKTGRYKRKKRFGKSIANKAPAMLITMLKQKCQSRGLKGVKEVDTHVRASQYNHQTDTCIEKALENRWNVMPDGERIQRDLYSAFLLQHCKQGLPEYNRKELKKEFGEELYRVFDREALQRDYPQFVAYHHMTIQRLSELPHTIPSMGIRRIIS

SEQ ID NO: 2490 - protein, 538 aa, unidentified
  REGION 1..538: note = Category: MG81 effectors
  REGION 1..538: note = Description: MG81-773 effector
  source 1..538: note = uncultivated organism sequence
MNHEEKEKDGATCCLTLPLKLEKWQSDHLEKRFEIARQLYNTLVHAELKKKCQVERMPEYQEIMKMIDAASNQKEKWALEKKRKAFLEENGFSRNAFKADMEKYYKHFNDNIGANVALHGITAQVWIAFDKVFVDNYKQKGKVHFKKPGELCSVQGYSQKKSGGKEIMFREDRIIWNQQGNRDRKKVKREFLLKLSPDNPYEAEMLKRHVKFVRILRKDGKTKPHWYAQLVLEGKPAVKRDPASGAPKHPIGHGVVGIDIGTRTLAYSTDKEVNLLELADHVQNIEQEKRRLQRKMDRSRRATNPENYNPDGTFKRGVKLTRNKSKRYRRIQHQLAMIQHHQADIRKQQHNELANYLLTLGDCFFVENMSYCDLVHRANKTEISEKTGRYKRKKRFGKSIANKAPAMLITMLKQKCQSRGLEGVKEVDTHVRASQYNHQTDTCIEKALENRWNVMPDGERIQRDLYSAFLLQHCKQGLPEYNRKELKKEFGEELYRVFDREALQRDYPQFVAYHHMTIQRLSELPHTIPSMGIRRIIS

SEQ ID NO: 2491 - protein, 368 aa, unidentified
  REGION 1..368: note = Category: MG81 effectors
  REGION 1..368: note = Description: MG81-774 effector
  source 1..368: note = uncultivated organism sequence
MYKTLKLRIYTKHTPKLVKLASAVNFVWNYVNDLCLQMWRRNRVFLSAYDVSEYTKGAGEELGLHSQTLQAIGEKHYQSRKQHKKVKLAWRTNRKDAKRKALGWIPFKASAVSHVKTYKTGKKALKSQVQLSCGKEKLILTVFDQYDLRQYTEIKTASVVENSCGNWYLCLTVKVEPAIENTATGEVGIDLGCKTAATCSNGDKLETKFTQQYAEKLATAQRAHKKKQVKRIHRKIKNKRTDATHKFTSSLVKENRLIVAGNVKSSSFTSGKLAKSVYDANWFAINRQLEYKSRRAGCLLIKVNEKFSTQTCSNCLQITNSSPKGVAGLGIREWICDCCGTKHDRDVNAAKNILRFGRETLAGGSSVL

SEQ ID NO: 2492 - protein, 405 aa, unidentified
  REGION 1..405: note = Category: MG81 effectors
  REGION 1..405: note = Description: MG81-775 effector
  source 1..405: note = uncultivated organism sequence
MKKQDVSSHRRSAPAEAPVKRNEPNAGLFTRTLRLKVRPESYAWLNMAALEVNSVWNFANERASTALGNLGKWLSGFDLNNQTSGATEYMKYIGADTIQRVNGEYAAKRNAARKQKLRWRVSRGAHRSLGWVPFKAASLKRKGNALRFAGKTFRMFESERLDSVKWRQGCFAQDALGDWWLCLPVIAEAAQSVAPREAVGIDLGLKAVATTSDGDALEAARFYRGAEQKIAQAQRRGHKRQAKRLHRKAARRRVDALHKFSRKIVDQYQKIVVGDVSAPKLARTWMAKSVLDSGWGMLKAQLLYKGEHAGRTVEVVDERYTTRACSACGSLSGPQGPDMLVVRRWTCADCGASHDRDVNAARNILRRAEVSASVSGNESCDSLVPPRGKRIRRREAGTKTARHAA

SEQ ID NO: 2493 - protein, 365 aa, unidentified
  REGION 1..365: note = Category: MG81 effectors
  REGION 1..365: note = Description: MG81-776 effector
  source 1..365: note = uncultivated organism sequence
MLFIHRPGIITVMVQCQIKLCLTRAQEAELDRWLWHFTGVYNWAIRKIGCDAAGGIYYRKRDFQNLLAGHGRKLGIPFHTLQGVLVQVRTASDRCGKRLDKNPRLKGHRNRLNSIPLPDPIKRPDGCRIKVPSIGSIRFHKQDIPDGRIKCGRIIKRASGWYLALSVDAQPNIVRTFKMKAHREVGIDSGYMAIVTLSDGERVDAPKECSAMEKRLTQAQRSGNRKLVEQLHEGIVSRKKDRNHKLSRYLVGTCAVMTFVHDNNQALQQKPGKSVANANIHQLQKMLAYKSSSFGRWFELMDGSWSTRTCSAYGSLAGPKGRHGLSVRRWVSEAYGASHERDIDTARNALISAVGSVVEEARDAA

SEQ ID NO: 2494 - protein, 357 aa, unidentified
  REGION 1..357: note = Category: MG81 effectors
  REGION 1..357: note = Description: MG81-777 effector
  source 1..357: note = uncultivated organism sequence
MSIVQYQLKLILRPAQERQLRRWLWHLTGVYNWAVRKIELDAADRRYWSTYSLEALLVGHSRRLGIPARVLERTARQGHDAWRRCFSKLGGQPRLKGRRNRLNSIPFPDPIAFFTGRRVRVSGLGSLKCHYQAIPPGRIKASRIVRRASGWYLCLFVEAEPRAIELNGNGEVGIDPGFGSLLTLSTGEKIEHPHELKETAIRLAQAQRGYRKRLTARLQERIGNQRKDRNHKLSRRLVAENAVIGWSKDAHQNIAKRFGKSVASAAHGQLRQMLAYKSRAGGREFIEVPSRNSTRACSACRALTGPTGWRGLKVRQWVCVGCGCEHDRDVNAALNTLIAARGLRVEKPGDGPSGMAA

SEQ ID NO: 2495 - protein, 364 aa, unidentified
  REGION 1..364: note = Category: MG81 effectors
  REGION 1..364: note = Description: MG81-778 effector
  source 1..364: note = uncultivated organism sequence
MKTLKLRIKDKHANQLNTLAGAVNFVWNYVNDLSFKHLQRTNHFFSAYDIAAYVKGSGELLNLHSQTLQAITETHAKSRKQFKKAKLNWRTNNPKSKRKSLGWIPFKKTAIKYLGVKKAGKKSLKSTIQFSLAKGKKLTIDVWDSYNLALYTINTCELVQGSRGHWYACITVKEYPKIECGTGETGIDLGCKDSAMTSNGEVLKTKVTQQYAKKLGIAQRAKNKQRVKAIHAKIKNTRQDLIHKFTTNLAKTNKIIIIGKLQSKSFTRGKLAKSVYDACWFEIKRQLTYKCENAGCYYDEVNESYTTQTCSCCGSRQNSPKGRTGLGIREWLCECGVTHDRDINAAKNILALGLERLAVGIPSL

SEQ ID NO: 2496 - protein, 349 aa, unidentified
  REGION 1..349: note = Category: MG81 effectors
  REGION 1..349: note = Description: MG81-779 effector
  source 1..349: note = uncultivated organism sequence
MLQVQLKLRPCKAQEQIYDQWLYNLASVYNFAVRKIELNAKDKIYFSKNDFQNLLANHGEKLGIPSHTIQGVLCTVHDAWKRCFKKTAGKPKLKGMRNKMSSIPFPDPIKAPKGNRITQPGLGSVRIHKQEITEGKIKCGRLIKRASGWYLCLFIDAEPNPIKRLAFGAIGIDPGFSNLLTTSDGEVIEHPRELEAAAERLGQAQRGHNKQLAARIQERIANRKKDRNHKLTTKLVSENVLIVWSKDAIKGIAKRFGKSVNSSSHAQIRQMLSYKMPKSGGTFIEVASKYSTKTCNECGNPTGPTGLAGLSVRQWECNVCGAQHDRDINAAINTLAAAAGCAVEGYAYV

SEQ ID NO: 2497 - protein, 358 aa, unidentified
  REGION 1..358: note = Category: MG81 effectors
  REGION 1..358: note = Description: MG81-780 effector
  source 1..358: note = uncultivated organism sequence
MIQYQRKLKLTKVQEAQLNTWLFHLTSVWNWAIRKIELDARDKVYYSRKTFQNLLTGHSGKLGIPSHTIQGMLDQTWLSWQRCFKKISRKPRFKGRRNKLNSIPFPDPIKPPLNNRVRMPLLGLVKFHKQDIPEGKINSGRIIKRASGWYLCLNINAQPNVIPHVSDDQVGIDPGYVTLLTLSTGEKIEHPKELQNNLIRLGQAQRGINRKQVARLHERIKNQRKDRNHKISRELVSKNQVIAISKDNLGGLARSGFGKSVGAAAHGQLRSMLSYKCRAGGREYIEVPSKFSTMTCSTCGARSGPTGKSGLKVRYWECNVCGTVHDRDVNAAINTLIAGLGISHESYREVASEIREVA

SEQ ID NO: 2498 - protein, 369 aa, unidentified
  REGION 1..369: note = Category: MG81 effectors
  REGION 1..369: note = Description: MG81-781 effector
  source 1..369: note = uncultivated organism sequence
MIQVQLKLKLKREQETMINEWFPILTSIWNWAIKKIEKDAADHIYYNKFEFINILAGHNKRLGMPSHTIQAMLKDAHTTWQRCFKKLARAPRLKGQRNRLTSISFPDPIKEAHINRTYVELPYLGKLKYHKQRIPIGKVKCARLVKRASGFYLCLFIDAQSNRIAHKGCELIGIQLSVDGRMALSNGDIIQREAQLQKHLNRLAQAQRGGNKKLVARLHERIANCRKDANHKLSRKIVEQYDTIVVNKDDLKQRARNLGLLVADSANYQLRLMMCYKSENNERKYIEFASKTGTDNAMISTVTCSVCRSPSGPASLTCLKVREWVCVSCGTLHDRDVNTAKNTLIAGLGASHESDASRVRNLLTSHYEL

SEQ ID NO: 2499 - protein, 355 aa, unidentified
  REGION 1..355: note = Category: MG81 effectors
  REGION 1..355: note = Description: MG81-782 effector
  source 1..355: note = uncultivated organism sequence
MKTLKLRIKDKHCKVLNQLASEVNFVWNYVNDLCFKHLQRKGQFFSAYDVAKYTKGTSKECNLHSQTIQAVTEELVIRRKQFKKAKLKWRVSNKKSARRSLGWIPFKKVAIKYADGYVQYGKHQFKLWDSYGLSKYTVKTGSFVEDSRGRWYVCLVVDSSKQEKLTATKAIGIDLGLKNIATCSDGTVIFNPKFYRQYEQKLGIAQRAKNKKRVRALHAKIKNCRKDHLHKASSILVKNNALIVIGDLSASKLVKTKMAKSVLDTGFSALKTMLKYKCENAGVLFEEVSEKFTTQVCSSCGEITASSPKGRADLRIREWRCCNEKCLSLNDRDINAALNILALGHKRLAVGISLF

SEQ ID NO: 2500 - protein, 355 aa, unidentified
  REGION 1..355: note = Category: MG81 effectors
  REGION 1..355: note = Description: MG81-783 effector
  source 1..355: note = uncultivated organism sequence
MKTLKLRIKDKHCKVLNQLASEVNFVWNYVNDLCFKHLQRKGQFFSAYDVAKYTKGTSKECNLHSQTIQAVTEELVIRRKQFKKAKLKWRVSNKKSARRSLGWIPFKKVAIKYADGYVQYGKHQFKLWDSYGLSKYTVKTGSFVEDSRGRWYVCLVVDSSKQEKLTATKAIGIDLGLKNIATCSDGTVIFNPKFYRQYEQKLGIAQRAKNKKRVRALHAKIKNCRKDHLHKASSILVKNNALIVIGDLSASKLVKTKMAKSVLDTGFSALKTMLKYKCENAGVLFEEVSEKFTTQVCSSCGEITASRPKGRADLRIREWRCCNEKCLSLNDRDINAALNILALGHKRLAVGISLF

SEQ ID NO: 2501 - protein, 1330 aa, unidentified
  REGION 1..1330: note = Category: MG81 effectors
  REGION 1..1330: note = Description: MG81-784 effector
  source 1..1330: note = uncultivated organism sequence
MKREKNITIMKISKVNHRRTAVALNGDKSELGGILYEAPVQKDKNGNYNDVIAETGKVVNEALDKKSRLYTPFNNQKVIIDKNLQRYANNLKRCYINFVKQYVNNKSFNYKAMQFIPDIQNPKTNDAVNYRTDRDNVYNKNKYYDKQTKSKSKKFIYEKIVIPQNEQNIVISALVNCSLRKSLRKDVSYKTKSGEIKTYNLPELVKKSMRFYCLEGQREPDEKEKYEMYILFSYMKEDKRTKNTDLLVKSISNQNTKVKVEDIDGNKLLKLSIADTKKKPLWEYLIKYADSSRQRELMYDIRKKIILYVAGIEEYENIKEDSGLSKVSWSKYNISDNKMFFDINSCTDKRKQNLEIKIREANIEHYRNASSKLCDDESIFWFQHFEGVIETLFSKKSKISEERLGCAYICDYLWKDFLSYLATKYIDLGKGVYHFTMKDKLDMLNKNEAVTDLRFGIVSEKYEKGITSFDYERIKAEEELDRNIAAYVTFAADIFAKSVIKSDYRTKKDNNSDVLQYSDKEFRNSEVIRDNAEKNILQYWGGYSRWGTENSKLPENNKVSDFGKLDVSDLCIDIKKHLAGIRNSSVHYTTKIKNESAADGSNVKILFEKDLADINIIYADKYYSNNVWMFYSLEDINKLIAFLYKEKRVIRQVQIPSFSRILKRKAMQDVINEIFKDDFDENIVNPELKEKYRNSLYFMLKEIYYNAFIIQPELKEKFKDKIKTMTSELYNKLKTIDKKEYKALYCMLSNEESALKNFADRIYSVDGDNVSFADICKILMTDYNMQNQEKKNIESMEQKKKNKGKDENYKHFPLLLHKVLKELFIEYLKQTHELEFLRNNICIKSDVTMESFESQIKGVEIYKDLKEKIDKNNSLLDWYVIAHFLMPKQLNHLIGNIKNYIQFATNIDKRAESVKNLIESGMVKRIQYYDDIVRTLEFSAQYIGKISNNINDYFNSEDEYVSFLSKYVGFINDKSEDVLTELKDFCREKINNGSQIIGIYYGGDNVIINRNVIYAQMYSNAEVFSNIYKKVTKNDIINYYEKQNDLKDVFKSGVCQNEGEQRSLCEFQQLKNRIELTELSTYADMVNDFMAQFVEWAYLRERDLMYFQLGIHYIRLFYSDNVLDEKYHKLSDNVIDIEEGALLYQIVAMYDYELRIFETDNSGNAKRIGQGGPGKSIPVFLKKYCNGTDVYECGLELFEDINQHEHIIRFRNDIAHMRYMSNQAMNIMSIVSNIYKSFFVYDTKLKKSISLVFKNILMRYGVIADLVFSYNNKNQSIKDDMDINIINIKNLKSDKYVYKIVNEDIVKQVEIEIRNQVFLEQLHNLLYFSR

SEQ ID NO: 2502 - protein, 352 aa, unidentified
  REGION 1..352: note = Category: MG81 effectors
  REGION 1..352: note = Description: MG81-785 effector
  source 1..352: note = uncultivated organism sequence
MKTLKLRIKDKHYKVLDQLALEVNFVWNYVNDLGFKHLKRKGEFLSAYDIAKYTKGTSKECNLHSQTVQAITEELVTRRKQFKKAKLKWRVSNKKSARRSLGWIPFKKVAIKYADGYVQYGKHQFKLWDSYGLSKYNVKTGSFVEDSRGRWYVCLVVDKTKQVKSKGNTSIGMDLGLKDLVTCSDGVKLKAPQIYRQYEQKLGIAQRARNKKRVKAIHAKIRNIRQNTLHQFSHKLVNKHAAIFVGNVNAKALARTKLAKSVLDASWTTLRTMLKYKCENASVWYKEVNEAYTTQTCSSCGSRCSSPKGRTGLGIREWQCMECGTFHDRDINSALNILALGHERLAVGIPVL

SEQ ID NO: 2503 - protein, 514 aa, unidentified
  REGION 1..514: note = Category: MG81 effectors
  REGION 1..514: note = Description: MG81-786 effector
  source 1..514: note = uncultivated organism sequence
MGNSSTDTCCLTLPLKLEKWQEDRLAKRFELARQIYNTLVRAELKKLERVKHSAPYREIQGQIQALDWSNPNDKGALRRLYKARDALLKSAGFTEYSFKSDIKYYYKHFSDNIGSNVAIHGIAPQVWTAFDKVLFNGGKKVHYKRYGDVSSVQGYSKTRKSGGTEIMFRGTYIEWKGLKLPLKLSPDNAYENEMLRYRIKFVRLVRKPGKQKDRWYAQLALEGKPVVKREPVTGEAVHPVGSGVVGLDIGPQTLAYSAPGEAGLVELADQVQNIEQAKCRLQRKLDRSRRATNPDNYSEDGTIRRGVKLTRNKSKRYRKIQNQLKYLQYCQAETRKRQHTQLANYLLSLGDSFYVEDMPWPALARRAKETVVSEKTGRIKRKKRFGKSIANKAPATLTRILNQKCTSLGLPGVVEVPTSVRASQYNHQTGEYIKKPLSQRWNNMPDGQRIQRDLYSAFLLQHYDPGTGTFDSASLQRDYPQFTQYHHQAIQHLLSMPKTLSSMGVRQSVRQYKA

SEQ ID NO: 2504 - protein, 381 aa, unidentified
  REGION 1..381: note = Category: MG81 effectors
  REGION 1..381: note = Description: MG81-787 effector
  source 1..381: note = uncultivated organism sequence
MLIIFVNKGSTSLIQVQLKLKLTHTQETMIQEWFPILTSIWNWAIKKIELDAADHIYYNKFEFVNMLANHNKRLGIPSHTIQAILKDAHTTWQRCFKKLARAPRLKGQRNRLTSVSFPDPIKKAHVNSTSIELPYLGKLKFHKQIIPSGNIKCARIVKRASGFYLCLFVDAQSNRIAHKGCEAIGIQLSVDGRMALSNGDIIQREAQLQKHLNRLAQAQRGGNKKLVARLHERIANCRKDANHKLSRKMVEQYDTIVVNKDDLKQRARNLGLLVADSANYQLRLMMCYKSENNDRKYIEVASNTSTAGATISTVTCSVCRSPSGPTSLTCLKVREWVCVSCGTLHDRDVNTAKNTLISGLGASHESAAKRVRNLLTNHYEL

SEQ ID NO: 2505 - protein, 348 aa, unidentified
  REGION 1..348: note = Category: MG81 effectors
  REGION 1..348: note = Description: MG81-788 effector
  source 1..348: note = uncultivated organism sequence
MIQAQLKLRLNTKQDAILTGWLWNLTGVWNWAVKKIELDAKDKIFYSPKEFHNLLAGHSEKMEIPSHTLQGMLSQAHLAWSRCFKKLAKKPHLKGLRNKLNSIPFPDPLRAPVGNHIAVPGLGSVRFHRQDIPEGKIKCGRIVKRASGWYLCLFIAADREPIAHTAHGQIGIDPGFKSLLTTSEGEIIEHPRELEAGAQRLAQAQRGNDRTLAARLQERMGNRRKDRNHKLSRQLVAENDLIAFSADNHKGVANKFGKSVSSSSHYQLRRMLSYKSRAGGTEYVEVDSKFSTKTCSNCGSLSGPTGWAGLSIRQWRCTECGTLHDRDVNAARNTLQAALGTRVEVCCA

SEQ ID NO: 2506 - protein, 538 aa, unidentified
  REGION 1..538: note = Category: MG81 effectors
  REGION 1..538: note = Description: MG81-789 effector
  source 1..538: note = uncultivated organism sequence
MNNEEKEKDGATCCLTLPLKLEKWQSDHLEKRFEIARQLYNTLVHAELKKKCQVERMPEYQEIMKMIDTASNQKEKWALEKKRKAFLEENGFSRNAFKADMEKYYKHFNDNIGANVALHGITAQVWIAFDKVFVDNYKQKGKVHFKKPGELCSVQGYSQKKSGGKEIMFREDRIIWNQQGNRDRKKVKREFLLKLSPNNPYEAEMLKRHVKFVCILRKDGKTKPHWYAQLVLEGKPAVKRDPISSAPKHPVGHGVVGIDIGTRTLAYSTDKEVNLLELADRVQNIEQEKRRLQRKMDRSRRAMNPENYNSDGTFKRGVKLTRNKSKRYRRIQHQLAMIQHHQADIRKQQHNELANYLLTLGDCFFVENMSYCDLAHRANKTEISEKTGRYKRKKRFGKSIANKAPAMLITMLKQKCQSRGLEGVKEVDTHVCASQYNHQTDTCIKKALENRWNIMPDGERIQRDLYSAFLLQHCRRDLPEYNRKELQKEFGEELYRVFDREALQRDYPQFVAYHHMTIQRLSELPHTIPSMGIRRIIS

SEQ ID NO: 2507 - protein, 536 aa, unidentified
  REGION 1..536: note = Category: MG81 effectors
  REGION 1..536: note = Description: MG81-790 effector
  source 1..536: note = uncultivated organism sequence
MNDEKYKKLLKQYHKLSDRHILVVETDMPYPDVLKVIALSDKIRKAGNELVSLMRKNYDQLMRTKKYRKLLKLYGNTKDKDKRKAIANQLNDMQKSYNVTWNFCRTSMIPIGKKYSIDAVFALTKAEDIWRGMEKCLYDNGKTIHLSKYGKLPCIRAKQIDRGIPMFVEDSKLRFKLKKMQFGIQVNDRFQSDEANAVLSYLENSDKMDADAVNTLIEEACCIDTYRPCYATLVPRLIRGKYRVYLHLTIEGKAKPKYDKFGNPRHKYGKGMIGADIGTQTVAYTSDTEVGLKNLSERGNSIQTSERKERLYYRAMDRSRRATNPQNYNPNGTIKKGKKTWKYSNHYKKLKAKHAELCRVNAVNRQLAINEDANYLRSLGDTFVTEPKNASKLMKRAKKTTVNSKGKFNKKKRFGKSIKNRCPSGFQTTVEKKFKITGGTYIEVPNNYRASQYDHTADDYIKKKLSDRLYRLRDETLVQRDWYSSFLLYCYDYRTQNIDKDKCITDFGRCYDKEKALIAWIKANHIKILNSGIKVT

SEQ ID NO: 2508 - protein, 380 aa, unidentified
  REGION 1..380: note = Category: MG81 effectors
  REGION 1..380: note = Description: MG81-791 effector
  source 1..380: note = uncultivated organism sequence
MRFFCEEKTRAGGKMIQRQLKLKLTPAQQRKCEAWLFRAAGIYNWTIRKMEQDAHGGKYWTAYGLIYEIAGHSKKCDVPAKIIQGTVARAHQAWERCYKKLSKKPRLKSARNKMSGLDIPSDVRRACERITIPGLGKVRYHKDMLPEGKIKACRILKKTSGWYLAVCLEAAPNTIQRTASGRIGIDPGFSSLLTTSDGVKFEHPREMEASAARLARAQRGGHKRTAARIQERIANQRRDRNHKLSRKLVRENELIVFSADRHKAIAKMFGKSVASSAHAQLRSMLAYKSRTGGTRYVEVDSRFSTKTCSACGCLSGPSGFSGLAVREWTCTECGTRQDRDVNAALNTLLSGAGRASKSEIAFCERRESDARMKRASAAQT

SEQ ID NO: 2509 - protein, 511 aa, unidentified
  REGION 1..511: note = Category: MG81 effectors
  REGION 1..511: note = Description: MG81-792 effector
  source 1..511: note = uncultivated organism sequence
MAKCSTDTCCLTLPLRLEKWQEDRLAKRFEIARQIYNTMVRAELKKLRAMEQSEPYKANQEKIQALDRKTQTDKQALKALYKERDKLLRDGGFSEYGFKSDIKNYYKHFNNNIGSNVAFHGIAPQVWAAFEKMLFKKEGKKVHFKKKGDIHSLRGYSAAGKSGGVEIIFRETYIEWKGLKLPLKLSPDNIYETQMLSYRVKYVRLLRKPGKRKDRWYAQLSLEGKPVIKYNPKTGEVRHPIGKGAVGLDIGPQTLAYSAATGADLVELANQVQNVEQEKRRLQRKLDRSRRATNPGNYADDGTIRRGIALTHNKSKRYLRTQQELKYLQHQQAEIRKRQHTELANHLLSLGDCFYVEKMVWTSLTHRAKETEISEKTGKIKRKKRFGKSVANKAPATLIGILQRKSAALGIPGVIEVPTSVKASQYNHQSGTYTPKPLSQRWNNMPDGERIQRDLYSAFLLQHYNPQTNTFDANSLHQDYPQFVQYHHDAVLRLYAMPKAPSSMGIKRSLR

SEQ ID NO: 2510 - protein, 578 aa, unidentified
  REGION 1..578: note = Category: MG81 effectors
  REGION 1..578: note = Description: MG81-793 effector
  source 1..578: note = uncultivated organism sequence
MAFGSKNSTPSFVLTLPLDISLNEQDYLYKEFKKCGVIYNQLVSATTKMWHQLRKTRKYRELMAAIAKATPDSDEQKTLFKQREKMLKEYRFSEDAFHKLVVPYAKHFAINSHVAQNVASAVWTAWEGFFFSKGKAVHYKKLEDVASISGKNNATGIVLRPANLTTSNIESAKRKAQKAVEKRYDDMYGRPDPKDDKKVVLPDEVKPQMEAEIAAAIAKIKPTIGEGSLRIVYGKHEFPVVLRNPKTQTGKYQQEALKCGVKYCRITRKWVKTKWKYYAQFILEGYPPTKCDGNGVMKHPVNQGRIGLDIGTQTLAVSGNDICDLMVLAPSARAQAKSLVNEIARTQRAMDRSRRATNPKYYNPDGTIKRLKRKYGQKQKRDWKYSKHHYRLRAKLRDLNRRLADIRKMEHNILANELLQHGNEFVVEDMNYKALQKRSKETKTNAKTGRAHTKKRFGKSLSRCAPAMFISILNKKANRYGGSVIKVSTFETKASQFDHTDESYTKKRLSERMAHLSSGEVVQRDLYSAFLLEYIDTESLEYNTKALNSAFPAFLVMHENTKRRLQAVGSSLPASIGF

SEQ ID NO: 2511 - protein, 369 aa, unidentified
  REGION 1..369: note = Category: MG81 effectors
  REGION 1..369: note = Description: MG81-794 effector
  source 1..369: note = uncultivated organism sequence
MSASVQNARVPTGTRSGSVIQVQLKLRPNVKLEKRLDEWLWHLTGVYNWAVRKIQLDADDKIYHSPMNFQNLLAGHAKKVGVPGHCIQGVLSTVHAAWQRCFRKQGGRPKLKGQRNKLVSIPFPDPIRCPEGSHVKLPVLGLVRFHKQFLPEGRIKCGRLIKRASGWHLCLFIDAAPKEIERVGFGKIGIDPGFKSLLTFSTGEKVEHPRELEASAKRLAQAQRGKDKKLVARIHERIANQRKDRNHKLSRKLVAENTVIRFSKDNIKGIAKKFGKSVTSSGHGQLRAMLAYKSSHIGGTQYDEPASKNSTRICSNCGCLSGPTGWAGLSVRNWVCQECGSLHDRDQNAAINVLNFGAGTALERGLCQI

SEQ ID NO: 2512 - protein, 368 aa, unidentified
  REGION 1..368: note = Category: MG81 effectors
  REGION 1..368: note = Description: MG81-795 effector
  source 1..368: note = uncultivated organism sequence
MKTLKLRIRDKHIAKLNHLSGAVNFVWNYVNDLSYKHLKKTGKFFSAYDLNDYTKGSGELVGLHSQTIQAINETHAKSRKQSKKAKLSWRTNNPNAKRKNLGWLPFKQSAIKHIATHQTGKKGLKSTLQLSLAKGQKLIIDLWDSYNLSLYQINTCELVQDSRNRWYACITVKDYPKKSCGGGSVGIDLGLKDSATASNGDKLQIKQTLKYAKDLAIAQRAKNKKRVKAIHAKIKNTRNDLIHKFTSQLVKDNALIVIGDVKTTQFNSKKGKLAKSVYDAGWFELKRQLTYKCENAGCRFEIVSERYTTQICSCCGEISANSPKGRANLGIREWTCAKCGTWHDRDINASKNILAVGLHRLAEGIPSL

SEQ ID NO: 2513 - protein, 371 aa, unidentified
  REGION 1..371: note = Category: MG81 effectors
  REGION 1..371: note = Description: MG81-796 effector
  source 1..371: note = uncultivated organism sequence
MRIVYHMKSKTQIKTLKVRIKDKHAAILNQWAFEVNQVWNAANELSADYSWVPIPEVGYINCGTSEYDLQKELKTIRAERNFSISAVTIQSVISQHAKSRRQFKKNKLQWRCSSGSKRSLGWVPFKSAGVKFINGQVRFCGKLFSIWDSYDLSKYELGTGSFSQDSRGRWYFNTTIKVEIKSSEGKTSVGIDLGLKTIATCSDGTVFERRRITDEFAKELATAQGAKKKNRVRAIHAKIKNTRSDAIHKFTTTMAENYGAIFIGDVSSKKLTKTKMAKSVLDAGWGMLKTQLKYKAIARSVMFEEINEKYTTQICSCCGVISGNSPKGRAGLGIREWICCECGAIHDRDINAAKNILALGHERLAVGISVL

SEQ ID NO: 2514 - protein, 358 aa, unidentified
  REGION 1..358: note = Category: MG81 effectors
  REGION 1..358: note = Description: MG81-797 effector
  source 1..358: note = uncultivated organism sequence
MILTFKYRIKDATVGKYLDRHSRSVNFVWNYCCETQRKVEAYYKAGAPKRRWPSHFDLVKLTTGCAAELGLHSDTVGQICKQFVISRNAARHAPRFRASRGPKRALGWLPFIKRTVKLDGAHVVYLKRKFHFWKSRDIPDAIKTGCFTQDARGRWYVCFQCEVADDLPTGNGEVGIDLGLKTLATCSNGDTISALRHYRKYEATLAIAQRAGHKQRVRAIHAKIANVRKDQLHKASSKIAAENQLIVVGNVSAAQLAKTRMAKSVLDASWSMLRNMLEYKASRHRARYVEADERWTSQVCSCCGTIPDSSPKGMGALGIRHWVCSDCGCSHDRDANAARNILRVGAERRPPVEEIPAL

SEQ ID NO: 2515 - protein, 367 aa, unidentified
  REGION 1..367: note = Category: MG81 effectors
  REGION 1..367: note = Description: MG81-798 effector
  source 1..367: note = uncultivated organism sequence
MIVRELKLKLTSNQVSKLNTQLFYLTGVYNWAVRTIELNAVNKIYYSKFDFVNLLANHSKTLGIPSHTLQGILEQAFIAWQRCFKKLAKKPRLKSVRNKLNSIPFPDAISGTRITDKTIGIPGLGQVRFYKQDLPKGKVKCARAVRRASGWYLQLSIDAQHHFPIKETFDKVGIDTGFKHLAVLSNGTKFENQRNFIKGQKRLAQAQRGSNKKLVARLHERTKNRRKDYNHKISRQIVEAFQEIYITNDNLQSQSKMFGKSVHDAGINQLKQFILYKGDTHGRKCVLVDSKNTTMTCSNCGILSGPTGLIGLVVRNWECSACGAQHDRDINAAKVILNTGLGWSLENTETHAVKPEIFRLESSGGAR

SEQ ID NO: 2516 - protein, 536 aa, unidentified
  REGION 1..536: note = Category: MG81 effectors
  REGION 1..536: note = Description: MG81-799 effector
  source 1..536: note = uncultivated organism sequence
MIDEEYSKILKQYHKLSDRHILAAKTDMPYSDVLKVVALSDKIRKAGNELVGLMRKNYDQLLRTKRYRKLLSLYGGTEDKAKRKNYANQLNEMQKSYNVTWDYCRTSMIPIGKKYGIDAVFALTKAEDVWCGIEKCLYGNGNIIHFSKYGELPCIRAKQINRGIPMSVKDDKLQFKLSKTSFGIQINDRFQQDEVNVILSYLAEPEIMDNKAVNTLIEDACCIDTYRPCYATLVPKMIRGKYRVYLHLTIEGKAKPKYDKHGNLRHKYGKGMIGADVGTQTVAYTSDTEVGLKNLSERGRSIQYSERKERLLFRAMDRSRRATNPQNYNDDGTIKKGHKVWKRSNHYKKLKARYSELCRINAVNRQLAINEDANHLRSLGDTFITEPKNAGRLMKRAKEATKNDKDRFNKKKRFGKSIKNRCPSGFQTTVEKKFKVTGGTYIEVPSNYRASQYDHTADDYIKKKLSDRLYKLRDGTEVQRDWYSSFLLYCYDYRTKDIDKDKCITKFNGCYNKEKALITWIKAHKIKVLNSGIKIA

SEQ ID NO: 2517 - protein, 367 aa, unidentified
  REGION 1..367: note = Category: MG81 effectors
  REGION 1..367: note = Description: MG81-800 effector
  source 1..367: note = uncultivated organism sequence
MYQVLKLRIYRKHYVKLDKLSSAVNFVWNYVNNLCWQMWRRKRIFPSAYDIHEYTKGAGEELGLHSQTIQFIGEKHYQSRKQHKKVKLAWRTNRPDAKRKSLGWIPFKASAISHVKTYNTGKKALKSQVQLSCGKEKLILTVYDQYDLRRYNGFRTAEIVQDSCDDWYLCLLVKVEPKVCTATGEVGIDYGCKTAATCSNGDKLETKLTKQYAEKLATAQRAHKKNQAKRINRKIKNKRADATHKFTSKLVKENRLIVAGNVKSSSFTSGKLAKSVYDANWFAINRQLEYKSRRAGCQFIVVDEKFSTQTCANCLQITNSSPKGVTGLGIREWICDCCGQLNDRDVNAARNILRFGRETLAEGSPVF

SEQ ID NO: 2518 - protein, 495 aa, unidentified
  REGION 1..495: note = Category: MG81 effectors
  REGION 1..495: note = Description: MG81-801 effector
  source 1..495: note = uncultivated organism sequence
MSHLRPSRSRNGSPRGIEAGGVIAHNRIEARRQPQQPLQIANFSDLAGVPERAGMMPSPTVTNSRMDETETTDPMDVCNAVDSAALACEGDSTGTWVTRTLRLKVKKNSYAWLNAAAAEVNQVWNWAAEISTKAARPCTGNAKWLTGFDLDKLSSGASKYFHKIGADTIQRVNGEYALKRKAAGRLRLRWRASAGSRRALGWVPFKAESLKRKGRAVRFCGKQIRVFEWKRLEGVKWKQGCFAQDAVGDWWLCLPHALRIEESVAPLEKVGVDLGLKDVAATSDGMRCEKGLFFRGIEKKIAQAQRRGHKRQAKRLHRTASNRRRAALHRFSRRIVENYQKIVVGDVSSTQLVKTRMAKSVLDSGWAMLKTMLQSKGQQAGRIVQIASERYTSSSCSSCGSLSGPHGVNGLRVSHHGTTGSRLRSAVDYAVGRERTVAQSHIRMGAGDEEITIYRFGCPCRNDCSGDSGTRGRSAQPGHDPQSAGVGPPAHRQAG

SEQ ID NO: 2519 - protein, 363 aa, unidentified
  REGION 1..363: note = Category: MG81 effectors
  REGION 1..363: note = Description: MG81-802 effector
  source 1..363: note = uncultivated organism sequence
MLQVQLKLRPCKAQEQIYDQWLYNLASVYNFAVRKIELNAKDKIYFSKNDFQNLLANHGEKLGIPSHTIQGVLCTVHDAWKRCFKKTAGKPKLKGMRNKMSSIPFPDPIKAPKGNRITLPGLGSVRFHKQEISEGKIKCGRLIKRASGWYLCLFIDAEPNPIKRLAFGAIGIDPGFSNLLTTSDGEVIEHPRELEAAAERLGQAQRGHNKQLAARIQERIANRKKDRNHKLTTKLVSENVLIVWSKDAIKGIAKRFGKSVNSSSHAQIRQMLSYKMPKSGGTFIEVASKYSTKTCNECGNPTGPTGLAGLSVRQWECNVCGAQHDRERRYQHPCCCGRMCRRGLRLCVAVQESQTSSLGASKH

SEQ ID NO: 2520 - protein, 503 aa, unidentified
  REGION 1..503: note = Category: MG81 effectors
  REGION 1..503: note = Description: MG81-803 effector
  source 1..503: note = uncultivated organism sequence
MAKCKTATCSLTLPLRVEKWQIDKLDKRFEIARKIYNIFVGFELKKLNRLKQTPEYREILHEIKLKNQDKEKNKAEIKALYNKRNAILKQWNFTELRFTNDMTTMNKYYSSNFGAITSQSISNDAWRAFNTLLFGKGEQIKFKKIGAVNSVSGKSFNREIRLIPSKNCIEWKGLTLPYRVERGNLYEEKMLSHKVKYVRILRKWANTKYNYYAQIVLEGVPEPKINKKTGELLHPIGEGRVGLDIGPQTIAYVSDTEVGLTELADKVVSIEKEKRRLSRKLDRSKRATNPTNYNQDGITKHGVKLTHNKSKRYLITQEELKTLYRKQADIRKLQHNILTNKLLSLGSEFYVEKMSIIGLARRAKKTEISEKTGKFKRKRRYGKSITNKAPAMLLQILNNKLKAQSLSKLIEIDTYNAKASQFDHINETYTKKSLSQRWTKLDNGDEIQRDLYSAFLIQNTDNTLKAFDKVLLNEKYSNFKIMHDAFINQLKEQSTYHPTSMGV

SEQ ID NO: 2521 - protein, 348 aa, unidentified
  REGION 1..348: note = Category: MG81 effectors
  REGION 1..348: note = Description: MG81-804 effector
  source 1..348: note = uncultivated organism sequence
MQLTYRFRLRDKHCSELNRQSRAVNFVWNYCNETQRNAARSSKKWLSGYDLMKLTAGTSGDLGLHGHTIQKTCAQYDKSRRQHKKPWLRFRGKKSLGWVPFNTGQVAFDGASFAFRGVRYEPMHLRDLAPGVKIGIGSFSADSRGRWYINVLVEVPGAAVVPASAVGIDLGLKSLAVLSNGEAIESPRFYRNHEAALATLQKAHKAKRTTAIHAKVANRRKDFLHKASATIARENGLIVVGDVSPSKIAKSRFAKSSLDASWADFKRMLSYKAIRHGGTFLEVDEAYSSQTCSTCGSRPESRPKGIAGLGIREWTCSDCGAVHDRDVNAALNILRAGQRTLAGGAHAA

SEQ ID NO: 2522 - protein, 364 aa, unidentified
  REGION 1..364: note = Category: MG81 effectors
  REGION 1..364: note = Description: MG81-805 effector
  source 1..364: note = uncultivated organism sequence
MKTQTKTLKVRIKDKHADVLNRMAFECNQVWNAANETSAEFSWVPVPEVGYMNMQTSGFDLMKELKGIRNDRDMIIGAGTVQEVIAVHAKARKQFKKNKLRWRSSGGARRALGWVPFKSGAAVWVNGQIRFCGIHFKCWDSYGLSQYNFRSGSFSQDARGRWYFNIVVQVEVEERIAGNGQIGIDLGLKTTATCSNGDTLERQNCYRNSEAKLGKAQRANKKKQIQTIHAKIKNRRADAIHKFSNKLVKENSLIVVGNVSASGLAKTKMAKSVLDAGWAMLKIQLDYKSKGMQGVFIEVNEAYSTQACSCCGTISANSPKGRAGLGIREWSCPDCGTTHDRDINAAKNILRLGHQSLAVGIPVL

SEQ ID NO: 2523 - protein, 514 aa, unidentified
  REGION 1..514: note = Category: MG81 effectors
  REGION 1..514: note = Description: MG81-806 effector
  source 1..514: note = uncultivated organism sequence
MGNSSTDTCCLTLPLKLEKWQEDRLAKRFELARQIYNTLVRAELKKLERVKHSAPYREIQGQIQALDWSNPNDKGALRRLYKARDALLKSSGFTEYSFKSDIKYYYKHFSDNIGSDVAFHGIAPQVWTAFEKVLFKGGKKIHYKQYGDVSSVQGYSKTRKSGGREIMFRGTYIEWKGLKLPLKLSPDNAYENEMLRYRVKYVRLVRKPGKQKDRWYAQLALEGKPVVKREPVTGEAVHPVGSGVVGLDIGPQTLAYSAPGEAGLVELAAQVQNIEQAKCRLQRKLDRSRRATNPDNYSEDGTIRRGVKLTRNKSKRYRKIQNQLKYLQYCQAETRKRQHTQLANHLLSLGDSFYVEDMPWPALARRAKETVVSEKTGRIKRKKRFGKSIANKAPATLTHILKQKCTSLGLPGVVEMPTSVRTSQYNHQTGEYIKKPLSQRWNNMPDGQRIQRDLYSAFLLQHYDPGTGTFDSASLQRDYPQFTQYHHQVIQHLLSMPKTPSSMGIRQSVRQYEF

SEQ ID NO: 2524 - protein, 348 aa, unidentified
  REGION 1..348: note = Category: MG81 effectors
  REGION 1..348: note = Description: MG81-807 effector
  source 1..348: note = uncultivated organism sequence
MIYRHLKLKLTKVQEESVHRWIPSLTSIWNWAICKIENDSKGGIYYSQKEFQNILCGTSKVLNIPSHTVQGVLISAHMAWQMCYKKAAKKPRFKGNRNRLNSIPFPDPFRVPKDNRITVPGLGRVRYHKQDIPEGKIKCGRVVKRASGWYLCLFIDAEPAKISGTGEGAVGIDPGYKHLLTLSTGEKVAHPKELQHSIKRIGQAQRGGNKRLVARLNERIANQRKDRNHKLSHRLVAENAVIAFSKDNIKGLSRAGFGKSVAAAGHGQFRLMLAYKSRAGGRQYIEVPSKGSTRTCSTCGASTGPQGRAGLSVRQWTCSACGTPHDRDVNAAINTLNAALGMSVERAI

SEQ ID NO: 2525 - protein, 387 aa, unidentified
  REGION 1..387: note = Category: MG81 effectors
  REGION 1..387: note = Description: MG81-808 effector
  source 1..387: note = uncultivated organism sequence
MKTLKLRIKDKHATQLNRLSSSVNFVWNYVNDLGYKYLQRTGKFLSAYDLNDYTKGSGELLGLYSQTIQAINETHAKSRKQFKKAKLNWRTNNPNSKRKSLGWIPFKQSAIKHIATHQTGKKGLKSTLQLSLDKGKKLVIDLWDSYNLSLYQINTCELVQDSRNRWYACITVKNYLKQTCGTGSVGIDLGLKDSATTSNGDKLQIKQTLKYAKDLAIAQRAKNKQRVKAIHAKIKNTRLDLIHKFTTGLIKQNALIVVGDVKSNQFNSKKGKLAKSVYDAGWFELKRQLDYKCKYAGCQLEMVNESYTTQTCSCCRQIDSNSPKGRTGLRIREWTCAKCSTWHDRDINAGKNILAVGLDRLGAGIPERQGGEEVKGHAHPSHLYECE

SEQ ID NO: 2526 - protein, 1330 aa, unidentified
  REGION 1..1330: note = Category: MG81 effectors
  REGION 1..1330: note = Description: MG81-809 effector
  source 1..1330: note = uncultivated organism sequence
MKREKNITIMKISKVNHRRTAVALNGDKSELGGILYEAPVQKDKNGNYNDVIAETGKVVNEALDKKSRLYTPFNNQKVIIDKNLQRYANNLKRCYINFVKQYVNNKSFNYKAMQFIPDIQNPKTNDAVNYRTDRDNVYNKNKYYDKQTKSKSKKFIYEKIVIPQNEQNIVISALVNCSLRKSLRKDVSYKTKSGEIKTYNLPELVKKSMRFYCLEGQREPDEKEKYEMYILFSYMKEDKRTKNTDLLVKSISNQNTKVKVEDIDGNKLLKLSIADTKKKPLWEYLIKYADSSRQRELMYDIRKKIILYVAGIEEYENIKEDSGLSKVSWSKYNISDNKMFFDINSCTDKRKQNLEIKIREANIEHYRNASSKLCDDESIFWFQHFEGVIETLFSKKSKISEERLGCAYICDYLWKDFLSYLAAKYIDLGKGVYHFTMKDKLDMLNKNEAITDLRFGIVSEKYEKGITSFDYERIKAEEELDRNIAAYVTFAADIFAKSVIKSDYRTKKDNNSDVLQYSDKEFRNSEVIRDNAEKNILQYWGGYSRWGTENSKLPENNKVSDFDKLDVSDLCIDIKKHLAGIRNSSVHYTTKIKNESAADGSNVKILFEKDLADINIIYADKYYSNNVWMFYSLEDINKLIAFLYKEKRVIRQVQIPSFSRILKRKAMQDVINEIFKDDFDENIVNPELKEKYRNSLYFMLKEIYYNAFIIQPELKEKFKDKIKTMKSELYNKLKTIDKKEYKALYCMLSNEESALKNFADRIYSVDGDNVSFADICKILMTDYNMQNQEKKNIESMEQKKKNKGKDENYKHFPLLLHKVLKELFIEYLKQTHELEFLRNNICIKSDVTMESFESQIKGVEIYKDLKEKIDKNNSLLDWYVIAHFLMPKQLNHLIGNIKNYIQFATNIDKRAESVKNLTESGMVKRIQYYDDIVRTLEFSAQYIGKISNNINDYFNSEDEYVSFLSKYVGFINDKSEDVLTELKDFCREKINNGSQIIGIYYGGDNVIINRNVIYAQMYSNAEVFSNIYKKVTKNDIINYYEKQNDLKDVFKSGVCQNEDEQRSLCEFQQLKNRIELTELSTYADMVNDFMAQFVEWAYLRERDLMYFQLGIHYIRLFYSDNVLDEKYHKLSDNVIDIEEGALLYQIVAMYDYELRIFETDNSGNAKRIGQGGPGKSIPVFLKKYCNGTDVYECGLELFEDINQHEHIIRFRNDIAHMRYMSNQAMNIMSIVSNIYKSFFAYDTKLKKSISLVFKNILMRYGVIADLVFSYNNKNQSIKDDMDINIINIKNLKSDKYVYKIVNEDIVKQVEIEIRNQVFLEQLHNLLYFSR

SEQ ID NO: 2527 - protein, 370 aa, unidentified
  REGION 1..370: note = Category: MG81 effectors
  REGION 1..370: note = Description: MG81-810 effector
  source 1..370: note = uncultivated organism sequence
MYITYRYRVKSLEGLLRKQAQAVNYVWNYCNETQKSYLRLGKKWLNHFDLTKLTTGVSKELGINSDTIGAICKKYVLSRRQHKRPFLRWRTKKSLGWIPLRGRHLEQTPNGFKYGGKIFKVFLSRPIPPVAKICDGSSFSEDARGRWYINLLLKLPDETVRPVQTAVGIDLGLKDLAVLSNGEKVETPKFFRGLEEKLGKAQRAKKKRLEKSIHAKISNSRKDFLHKLSTRIVKRFDWIAVGNVSSSKLAKTRMAKSVLDAGWSSFRSFLAYKALACGATFMEVNESFSTQVCSSCGCIPPESPKGIADLGIRNWTCGDCGAVHDRDVNSANNILFGSGCRTPVEGTLIENMKETSNPDLSKCEKVFTFK

SEQ ID NO: 2528 - protein, 578 aa, unidentified
  REGION 1..578: note = Category: MG81 effectors
  REGION 1..578: note = Description: MG81-811 effector
  source 1..578: note = uncultivated organism sequence
MAFGSKNSTPSFVLTLPMVIGLNEQDYLNKEFKKCGIIYNQLVNATTKMWHQLRKTRKYRELMAAIAKAAPDSDEQKALFKQREKMLKEYRFSEDAFHAMVVPYAKHYAINSHVAQSIATAVWTAWSSFFFDKGKGVHYKKLEYVSSISGKNNATGIMLRPANHTTSVINSAKTKAKNSIEKKYFAAYRKPDAKEGEEVVLPDEVKAQMEKEIAAATAKVKTSIGKGKLHITYGDYTFPVTLRNPDTQTGWYQQEALKCGVKYCRIIRKWVSTKWKYYAQIVLEGYPPIKCDNNGVAKHPVKQGRVGIDIGTQTIAFSGKDVCDLRVLAPAARAQAKSLVNEIASTLRAMDRSRRATNPKYYNPDGTIKRLKRQHGQKQKRKWKYSKRYYRLRAKLRNLYRKLADIRKMEHNILANELLANGNEFVVEDMNYKALQKRSKETKINPKTGRAYTKKRFGKSLSRCAPAMFISILGKKANRYGGSVIKVSTFETKASQFDHTDESYTKKKLSERMARLRSGDIVQRDLYSAFLLEHIDTESLQYNMETLNSAFPAFLEMHENTKRRLQTVGSSLPASIGF

SEQ ID NO: 2529 - protein, 383 aa, unidentified
  REGION 1..383: note = Category: MG81 effectors
  REGION 1..383: note = Description: MG81-812 effector
  source 1..383: note = uncultivated organism sequence
MPLSFTRTLRLKVRREAYAWLNAAAVEVNEVFNYCNETSLKAATRTDNKRKWMSGFDLCYLTAGATQYFDRIGAGTIQSICIHYAQKRQAARRVKLRWRVSRGARRSLGWVPFKAASLKRKGVCLRFAGKCLRVFERERLEGVRWQAGCFAQDAVGDWWLCLPVKVEAEETIAPQEAVGIDLGLKEIAVTSGGERLEAGRWTQGYAQKLASAQRRGHKRQAKRIHRKAARCRADALHKFSRRIVDRYQNIIVGDVSSLKLVKTRMAKSVLDSGWGMLKNFLDYKSQQAARSFKVVSERNTSVTCSACGALTGPRGVNGLIVRLWICSDCGESHDRDVNAARNILIGSRCRTSVSGNESSPWLIPPSSAYRVREAGIETARAAA

SEQ ID NO: 2530 - protein, 347 aa, unidentified
  REGION 1..347: note = Category: MG81 effectors
  REGION 1..347: note = Description: MG81-813 effector
  source 1..347: note = uncultivated organism sequence
MIQYQLKLRMCKSQEQQCEQFLYHLSSVWNWAVRKIELNAKDHIYFSKMEFQNFLANHSERIGIPSHTLQGVICTAHDAWKRCFKKIGGKPRLKGMRNKMSSIPFPDPIKAPKGNRIILPALGSVRFHKMDLPTGKIKCGRVVKRSSGWHLCLFIDAEPKAIERMGYGVIGIDGGFKDLLTLSTGEKIEHPRELEAAAERLAQAQRGHDTKLAARIQERIANQRKDRNHKLSHRLVAENVVIKFSADNHKAVARRFGKSVASSGHSQLQRMLSYKSPQSGTEYFEIAPKDSTKTCWVCGEPTGPTGLAGLSVRQWRCTTCGTFHDRDQNAAVNTLIAAAGCAVEVCI

SEQ ID NO: 2531 - protein, 352 aa, unidentified
  REGION 1..352: note = Category: MG81 effectors
  REGION 1..352: note = Description: MG81-814 effector
  source 1..352: note = uncultivated organism sequence
MTQTKTLKVRIRDKHAPMLRHMARSVNFVWNYLNELSQRSIRERGVFLSAYDMQKYTNGCAKELGLHSHTVQVVGKEYATRRLQFRKSRLNWRKSRGVRRSLGWIPLNTGAASWKNGQVYHNGNFFKVWDSFGLGHYRFRSGSFTEDARGRWYFNVVVDVEAKPSAGKHAVGIDLGLKTVATCSDGAALENARFYRDLEPALAIAQRAGKKARVRTIHAKIANRRKDALHKFSRSLVERCNLIVVGDVSPQKLAKTNMAKSVLDAGWGQLKTMLAYKCAHAGIVFREVSEAYTTQTCSCCGAMPGERPRGIAGLGIREWTWECGVTHDRDINAARNILAAGHRRLAVGIPAL

SEQ ID NO: 2532 - protein, 1668 aa, unidentified
  REGION 1..1668: note = Category: MG81 effectors
  REGION 1..1668: note = Description: MG81-815 effector
  source 1..1668: note = uncultivated organism sequence
MDLHSDGDGERDHGIISPVKEKVEETLPEFICKGTYKGVPLCDDNKNRIRGRKGKYHLFVLLKSDAGKKHLLAENANMLVKDDWAANRYFHMASSVVNRLIFHNPLYSGGQMPAIKLDIATRATGDIDKMGNGIKEEFQKQKYRVKKGNNREYYSIMNADIYRTLIAQEMVNSGKINIRIEKLNIKSICYDSSGQGMEFLYLADSICSILGYRLTKTGSSADDWLVQIKERICDLNRDNENLIFGYDEIDNYFSNAWGQFENKDMFKALSVIYDAKWMKGEFAKHYQNEWFPFLEEQLRRRATPELFLQSVDQLHAFLQTNNIDQEKLLYIMQQLESMVEGVSNRFKSKESKERALYKLYDAGVAVYCHIGDATKAQGYYEKCRLHVVYVSLDDYMKTNNRLIVLLEDAFQWDEALNKAKENLDILQMIAKGATVSPKNFLDCLQKSAETIKFERRKKKSGNVVWVPVKLEEDYKKYGTSLQEQVEQAVHFNIKRSLSKETVIHSVCKILISFFQKNQITLKEEESRLLIQALDKDIRKEKQLKYIEKSIQLQNTKVQPVQVDGKTVLALSGAKHPKKKIIFDFLVRYANASQSDQENMLIQMRKWILLFVCGEQAYKEAEEKGISTRGFAAEHGDIPGTFGGDVYSKISDLQEIKKQDKGASERLKVSKLKKEIAAMINDTLTTVYREIKGMDGVAEEDMFWIEYIQKEVQKVLLKKNKLATGIEYKIQNKYLCNQVWKNWVSFIAGKYVDMGKGVYHFVMPECNSNINELEVCEVQDFYKKGISSFDYEMIKAEETLERDMAVAVTFAVNNFSRAIIKKESERTTSQNEDVLQYTEKEFEKYCDGENIHKNILQYFGGISKWEDCEIVHASGFEVFDTIKKNINCVRNASYHYSQNLEKREVRNKYVDMLCRHEVDNYTEIIKDKYYSNNLYRFYPESTLKRLMDELYSEVKERPAQIPAFNRIINKQKIAAFLSTVIKGNKLKKVIGNVEDASLFYPAMIFLLKEIYYNAFICNENCKKWVEEAALKNAENEKDKNKKEANKNFILRLEQLHTESFGDMCQQLMTALDLQNNRDHRVNTNADQLKYKHFRILLYNAIYEAFANFIKSKEQKLYSLYDAVREPVLQTNLKTREEFLSGWTAHRYDTKIDKITGNSILSAWYVTSHFLAPRQVNHLAGSMKNYRQFVNDIGDRRNKVESKQSYRKTEIYEDVVMVLELVDASSGQISNEVKDYFGSDEEYARHLSKYVDFSDEKAKNNMEEPSCRMLLQLFSENRQQTGDGDMIDIYYKNNVILNRNIVLSKMYGLDICENGWWQKVTLENDILNYYKLKRELSSGSKFTGTAVFEKGRCEFPEEQEKLKKFQNIKNRVELLDVMTYEEILIDLYSQLVSWAYMRERDLLYMQLGVAYLALNYGDKSYRTRSREMFGDDRLNSMEGPGPVNIKNGALLYQLIAMNNPCMTLYEVENGKATPAKKAGNSIGARVGCLYKGYLNCREEVYKNGLYFFENYQLHDYIVKHVRNEIDHFKYFRKPVKSLLELYSEIYTYFFTYDKKLQKSVTFILLNILEKYFVRAKIQMGYKKVEVKNDKKEMIPVIETDINIEKAHSLYMFYNQIKYREQDSKEDKKAYNDYKSRYDLDIGKGVLKLEARDDLFVKQLLELLSYKESMR

SEQ ID NO: 2533 - protein, 353 aa, unidentified
  REGION 1..353: note = Category: MG81 effectors
  REGION 1..353: note = Description: MG81-817 effector
  source 1..353: note = uncultivated organism sequence
MIQCQVKLKLTPRQGRQLDHWLRHLTSVWNWAIKKIENDGRDGIYYRSKEFQNLLAGHSRKLSIPSHVLQGVLSQAHGAWARCFKRITRRPRLKGRRNKFNSIPFPDPIRPPTGNSLTLFGIRRVRFHKQTIPSGVIKCGRIVKRASGWYLCLFIDAEPNAISPISNGEIGIDPGFSSLLILSTGEKIEHPRELEATEQRLAQAQRGNNKQLVSRLQERISNQRKDRNHKLSHRLVAENQVVAFSKDRHSAIAKRFGKSVASSGHYQLRQMLSYKSKCRTDGLGVYVEVDSRNSTKTCSACGCLSGPTGLAGLKVRQWTCADCGAQHDRDVNAAINTLIAGAGLAHEMSVRAA

SEQ ID NO: 2534 - protein, 352 aa, unidentified
  REGION 1..352: note = Category: MG81 effectors
  REGION 1..352: note = Description: MG81-818 effector
  source 1..352: note = uncultivated organism sequence
MIQIQLKLRPTPRQERRLGHWLRHLGSVWNWAIKKIEHDSRDCIYYSSLDFRNLLNSHGPKMDVAQDAICGTLWSAHTSWRRCFKKVSRKPRLKGRRNRFNSIPFAHGVKVIDGRLSVVRLGRIRFHKQEIPEGQISQFRLVKRASGWYACLFIKADGDAIFATADGCVGIDPGFSSLLTLSDGEVVEHPRELEASAKRLSQSQRGRNRKFTSRLQERIANQRKDRNHKLSRRLIAENQLIAFSADRHKSIAKRFGKSVASSGHAQLRQMLSYKSKRRTDGLGVYVEVDSRNSTKTCSACGCLSGPTGLAGLKVREWECAQCGTEHDRDINAAINTLIVGLGGSHERQAIAI

SEQ ID NO: 2535 - protein, 352 aa, unidentified
  REGION 1..352: note = Category: MG81 effectors
  REGION 1..352: note = Description: MG81-819 effector
  source 1..352: note = uncultivated organism sequence
MKTLKLRIKDKHCKVLDQLASEVNFVWNYVNDLCFKHLQRKQQFFSAYDIAKYTKGTSKECNLHSQTIQAVAEELVTRRKQFKKAKLKWRVSNKKNARRSLGWIPFKKVAVKYADGYVQYGKHQFKLWDSYGLSKYNVKTGSFVEDSRGRWYVCLVVDSIKTEKTTAKTSIGIDLGLKDLATCSDGVKFKAPKIYRQYEQKLGIAQRARNKKRVKAIHAKIKNLRQNMLHQFSHKLVNEHAAIFVGNVNAKALAQTKLAKSVLDAGWTTLRTMLKYKCENAGVWYEEVNEAYTTQTCSCCGSRSSSLKGRAGLGIREWQCVECGTFHDRDINSALNILALGHGRLAGGISVL

SEQ ID NO: 2536 - protein, 491 aa, unidentified
  REGION 1..491: note = Category: MG81 effectors
  REGION 1..491: note = Description: MG81-820 effector
  source 1..491: note = uncultivated organism sequence
MKKSNTDTCCLTLPLKLEKWQEDRLAKRFEIARQIYNTMVHAELKKLRNIENSQPYRQIQKQIEALNWKNQNDKARLKSLYNDRNKLLNTIGFSEYGFKADIKYYYKHFNDNIGSSVAVHGIAPQVWAAFEKMLFHKEGKKVHYKKKDDIHSLHGYSVTGKSGGVEIIFRKTYIEWKGLKLPLKRSPDNAYETEMLGRRVKYVRLLRKPGKRKDCWYAQLSLEGKPAIKRDPESGERRHSIGRGAVGLDIGPQTLAYSACGAADLVELADQVQNIEQMKRRLQRKLDRSRRATNPDNYADNGTIRRGVKLTHNKSNRYRRTQRELRYLQHCQAEIRKRQHIELANHLLALGDCFYVEDMAWPSLTHRAKETAISEKTGRIKRKKRFGKSVANKAPATLIGILEQKCNSLGLPGVVKVPTSLRASQYNHQSGEYTSKPLSQRWNNMPDGERIQRDLYSAFLLQHYDPKAGSFDSALLQQDYPQFVQYHHRAI

SEQ ID NO: 2537 - protein, 367 aa, unidentified
  REGION 1..367: note = Category: MG81 effectors
  REGION 1..367: note = Description: MG81-821 effector
  source 1..367: note = uncultivated organism sequence
MKTLKLRIKDKHANQLNKLAGSVNYAWNYVNDVSYKHLQKTGKFFSAYDLNEYTKGSGEYLGLHSQTLQAINETHAKSRKQFKKAKLNWRTNRPDAKRKSLGWIPFKKSAIKYLSTRQTGKKALKSTIQLSLSKGQKLIIDVFDSYNLSLYQINTLEIVQDSRNRWYACITVKDFPRQVSGKGSVGIDLGLKESATTSMGDVLTTKQTQKWAKKLAVAQRANNKKWVKAIHAKIKNSRLDLIHKFTTQLIKDNALIVVGYVKSRSFTGKKTKLAKSTYDAGWYELKRQLKYKCENAGCRFEIVNEKYTTQTCSCCGDMSSSPKGRAGLRIRGWTCAECGTWHDRDINAAKNILAVGLDRLAGGIATQ

SEQ ID NO: 2538 - protein, 352 aa, unidentified
  REGION 1..352: note = Category: MG81 effectors
  REGION 1..352: note = Description: MG81-822 effector
  source 1..352: note = uncultivated organism sequence
MIQCQLKLKLTARQERQLGHWLRHLTSVWNWAVKKIENDARNGIYYSRLTFRNLLNGHGRKIDVPQDALCGTLDTAYTAWRRCFKKQTRRPRLKGRRNRLNSIAFGHGTRVINGRVVIPRMGRVRFYKQAIPMGHIGQFRLVKRASGWYACLFIQADREAVPVVASGTVGIDPGFSSLLTLSTGEKVEHPRELEASTLRLAQAQRGSNKKLAARIQERISNQRKDRNHKLSRRLVAENQLIAFSADRHKSIAKRFGKSVASSGHAQLRQMLSYKSKCRTDGLGVYVEVDSRNSTKTCSACGCLSGPTGLAGLKVRQWVCVACGAEHDRDINAAVNTLIAGAGAVHEGQVIAA

SEQ ID NO: 2539 - protein, 344 aa, unidentified
  REGION 1..344: note = Category: MG81 effectors
  REGION 1..344: note = Description: MG81-823 effector
  source 1..344: note = uncultivated organism sequence
MARAVNYVWNYCNDIQKKAARSNRRWVNWVMLNNLTSGCSKELRLHSQTIQAIGECYATSLKEAKSPTGKKKRFLRFRGRRSQGWIPFKASGIKLRGDSAVYQGRRFKFWKTRDIPPTIKNGNFSCDSRGRWYLNLVCEYEETIVSNEGNVGIDLGLKSLATLSTGKKYDAQKFFRKYERKLAHHQRCNNSRQVQTIHAKIANSRKDFNHKVSHELTRDFNKIFVGDVGSLGLLKTKLAKSVSDASWGQLRTFIEYKAIARGGTYYVVDENNTTRTCSACGCLTGPSGLAGLRVREWQCKECGTVHDRDTNSAINIEQRGLLTLPSPLRTLSAKDSESLGIPRL

SEQ ID NO: 2540 - protein, 351 aa, unidentified
  REGION 1..351: note = Category: MG81 effectors
  REGION 1..351: note = Description: MG81-824 effector
  source 1..351: note = uncultivated organism sequence
MIQTQLKLRLSATKEAQLNDWLWSLTGIHNFAVRKIELDAKDGIFYPRMGFQNILAGHGGKIGIPSHVVQGMLAQVHTAWSRCFKKIGGKPKLKSARNKLNSIPFPDPIRSPNGNHIKLPGIGLICFHKQEIPVGDIKCGRIVKRASGWYLCLFIDAERKPIKRIACGRIGIDPGFKDLITTSDGEKVPHPKELQNKIARIGKAQRGVNRKLVARLHERVSNQRKDRNHKLSLRLVQENTLIVFSKDNIKGIAKKFGKSVSSSGHAQLRSMLNYKSRAGGSQYTEVNPRNSTRTCSSCGALTGPHGLAGLSVRQWECGCGVRHDRDVNAAVNTLLSGLECAANQGGLRDVA

SEQ ID NO: 2541 - protein, 348 aa, unidentified
  REGION 1..348: note = Category: MG81 effectors
  REGION 1..348: note = Description: MG81-826 effector
  source 1..348: note = uncultivated organism sequence
MQITLKLRLRDRHAAKLARHARAVNYVWNYCNERQRQAVRECRRWLSYPALAALTAGTSVDLDLHAHTIQRVCLAYAAARRAHKKPWLRWRGRRSLGWVPFNTGHVSFDGEAFTFRGVRYETMHLREIPTGAVIGAGSFNADARGRWYINLPVEVLEATSASITHVGIDLGLKDFATLSTGEKIAAPRFYRASETKLATAQRARKTRHARAIHRKIAARRRDFLHKTSVQLVKRFGLIFVGDINPSQLVRTTMAKSVLDAGWSNFRAMLRYKSRLRGGGVCLEVSEHLSTQTCSECGRLPASRPRGIAGLRERVWRCDDCGTVHDRDVNAARNILRLGQQTLGGGAHV

SEQ ID NO: 2542 - protein, 384 aa, unidentified
  REGION 1..384: note = Category: MG81 effectors
  REGION 1..384: note = Description: MG81-827 effector
  source 1..384: note = uncultivated organism sequence
MTGVFGTIFATSNFMARPSKSANRQAALGVTTRVLRLRIKDKHARVLSAMAREVNQVWNYCNETSHRAIRERSQWLSGYDLQKLTNGFSKCEGVQIGSPTVQQVCEDYAKARKQFKRAKLRWRVSNPKSSKYSLGWIPFKARALQYKAGQIAFAGQRLHLWDSYGLGDYELRAGSFSEDSRGRWYLNVVVKVSTKASTATASVGIDLGLKEAAVASDAQRIEGRFYRKLEARLGIAQRAGKKCRVKAIHAKIKNQRKDMLHKFSAAMVKDYGAIFVGDVASAKLVKTKMAKSTLDAGWASLKTMLEYKSHQAGVVFEVVSESYTTQTCSCCGSIPASSPKGRTGLRIREWVCSGCGAVHDRDVNAARNILAAGHRRLAEGISGV

SEQ ID NO: 2543 - protein, 536 aa, unidentified
  REGION 1..536: note = Category: MG81 effectors
  REGION 1..536: note = Description: MG81-828 effector
  source 1..536: note = uncultivated organism sequence
MIDGEYKKILKQYHKLSGRHILVAETDMPYSDVLKIVILSDKIRKAGNELVGLMRKNYDQLFRTKRYRKLLFLYGNTGDKVKRKILANQLNEMQKSYNVTWDYCRKSMIPIGKKYGVDAVFALTKAEDVWHGVEKCLYGNGRTIHFSKYGELPCIRAKQINRGIPISVKDNRLQFKLGKTTFGIQADDRFQTDEVNAVLAYLAEPEIMDKKAVNTLIEDAYCVDTYRPCYATLVPKMIRGKYRVYLHLTIEGKAKPKYDKYGNLRHKYGKGMIGADIGTQTIAYTSNIEVGLKNLSERGNSIQTSERKERLLYRAMDRSRKATNPQNYNDDGTVKKGHKTWKYSNHYKKLRARHSELCRINAVNRNLAIKEDVNHLRSLGDVFVTEPKNASKLMKRAIKTTKNYKGRFNRKKRFGKSIKNRCPGGFQSNVEKKFKATGGTYIEVPNNYRASQYDHTADDYIKKKLSDRLFKLHDGTEVQRDWYSSFLLYCYDHMTHDIDKNKCNTKFEEQYNREKALITWIKANKLKILNSGIKIA

SEQ ID NO: 2544 - protein, 356 aa, unidentified
  REGION 1..356: note = Category: MG81 effectors
  REGION 1..356: note = Description: MG81-829 effector
  source 1..356: note = uncultivated organism sequence
METTKTLKLRIKDKHARVLSAMAREVNTVWNFCNETSHRSIRERFKWLSAYDLQKLTAGYSKCEGVQIGSATAQLVCEEYALRRRQFKKAKLRWRVSNPKSSKYSLGWIPFKVGGVKYKAGQVVFAGHKLSLWDSYGLADYELRAGSFVQDTRGRWYLCVAVKVQVKPSTATGSIGLDLGLKEAAVASDGQRIEGRFYRKLEAKLGIAQRAHKKQRVKALHAKIANQRKDMLHKFSTRLTKEYGAIFVGDVSSQKLVKTKMAKSTLDAGWSMLKTMLEYKSQQAGVVFEVVNESYTTQTCSCCGSIPASSPKGRAGLRIREWTCSDCGAVHNRDTNAARNILAAGLRRLEAGITVL

SEQ ID NO: 2545 - protein, 420 aa, unidentified
  REGION 1..420: note = Category: MG81 effectors
  REGION 1..420: note = Description: MG81-830 effector
  source 1..420: note = uncultivated organism sequence
MVSETGLEPAPHAPNARALPTELLTEKMVCVNGFEPLISCFRGKWSNQTLLYAVINKLLQLCVILTPYMKTLKLRLKDKHASVLIAMAKEVNTVWNFCNETSHKAIVERKKFLTSYDLDKLTAGYTKIDGVKINSRVMQSVSVEYVSRRKQFKKNKLAWRVSNGKASKRSLGWIPFKVDTIVYKSGQVKFAGYKFSLWDSYGLSQYKFRSGSFNQDARGRWYLNIAVEIEPFVGPQPQKSQIGIDLGLKSAVTCSDGKVLIGRNYRKYEKAIALSQRARTKKKTRNIHAKIKNTRKDELHKLSNELVRKNSMIFVGNVNGSKLAKTKMAKSTYDAGWYMFKTMLEYKCNYAGAVFEVVDESYTTQTCSTCLRLSGPQNLKGLGMREWICCGCQSVHDRDINSAQNILAVGLGRLAEGIAV

SEQ ID NO: 2546 - protein, 389 aa, unidentified
  REGION 1..389: note = Category: MG81 effectors
  REGION 1..389: note = Description: MG81-831 effector
  source 1..389: note = uncultivated organism sequence
MNNPLMPLSFTRTLRLKVRREAYPWLTRAAFETNQVFNYCNEASLLAATRTDLKRKWLTGFDLCNLTSGATKYFEHIGADTVQSICVHFAQKRIAAKKLKLRWRASGGAKRALGWIPFKAASVKRKGNSLRFAGKMFRVFNRDYLGEHKFRDGCFAQDACGDWYLCIPVHMPVEQTVAPREEVGIDLGVKTIATTSDGEKLEGGRWTHGGADKLAMAQRRGHKKQAKRIHRRVANQRKDALHKFSRKIVDQYQNIIVGDVSSKKLVKTKMAKSVLDSGWGMLKNMLDYKSQQAARTFSVVNESYTSITCSSCGSLTGPRGVNGLIVRSWICSECGDSHDRDVNAARNILTAARLSPSVRGNESSDSLIPSSRLRKHRRETRTESVRTAA

SEQ ID NO: 2547 - protein, 511 aa, unidentified
  REGION 1..511: note = Category: MG81 effectors
  REGION 1..511: note = Description: MG81-832 effector
  source 1..511: note = uncultivated organism sequence
MSKRNTTDTCCLTLPLKLEKWQEDRLSKRFEIARQIYNTLVHAELKKLRQVEQSAEYRQIQVQLREMYQNNTTKTKEFRDIANRRRKLLDAAGFREYDFKSAIKDYYKYFKENIGSNVAIHGIAPLVWTAFENKLYKNGKKVHYKRPGDIYSLRGYSVTGKSGGSEIMFRGTYVEWKGLKLPIKRSPDNDYETAMLEYRVKYVRILRKPGKHKNHWYAQLSLEGKPVIKMNPVSNEPVHPIGSGAVGIDIGPQTIAYASQSEAGLLELASQVQNIERQKGLLQRKMERSRRDMNPENYMPDGTFRRGVKLTKNKSKHYCKLQRELAYLQHRQVETRKRQHIELANHLLSLGDCFYVEDMKWLSLTHRAKETEISEKTGRIKRKKRFGKSIANKAPATLIGILDTKCKSLGIPGVVKVPTIMKASQYNHQSDTYEKKPLGQRWNDMPSGERIQRDLYSAFLLQHLEPDLTGYNKKMLAQDYPQFVEYHNHVINDLSMKPKTLASMGIRRRVS

SEQ ID NO: 2548 - protein, 383 aa, unidentified
  REGION 1..383: note = Category: MG81 effectors
  REGION 1..383: note = Description: MG81-833 effector
  source 1..383: note = uncultivated organism sequence
MQGEDDVPPGAKLHRPNRLDALCQGRDHPYRPNGSEDLQLPRQGRDERLIALGDAVNTVWNYFNEISMRSAQRGPIWAAKKQLRVLTKGSGKLLGLPSQVVQEMINQYVIKRKAARRPKLRWRASRGPRRALGWVPFTNQDIALDGTTVLLRGQRFRLWLHRAVEGRIKSGNFSQDARGRWYCNLVCEVPRSQGRGRDDIGVDLGLKSVAKCSDGTGLEQAQFYRCLEPKLAEAQRKRRKRQVKSIHAKIANRRKDVLHKFSRALVDRARKITVGDVSASAMTKTRMAKSVLDAGWSTLRGMLRYKCDHAGVAYAEVNEANTTRTCSFCGRLSGPTGLAGLSIRRWTCGECGSEHERDQNAARNIARLGCETPCPSGHGSPGF

SEQ ID NO: 2549 - protein, 579 aa, unidentified
  REGION 1..579: note = Category: MG81 effectors
  REGION 1..579: note = Description: MG81-834 effector
  source 1..579: note = uncultivated organism sequence
MAFGNKNSTPSFVLTLPMKVTEQDEIFLSKKFRVGCTVYNQMVTKTTKMWHQLRKTREYKNLVKAIKAAPANSDKRKALLVQRSNLIKQAGFSEGAFHKLVVPYQKAYNVNCDVAQKVASAVWKAWDDFFYGKGKTVHYKKLDDFVTLSGKKNNSGIFFRPANHTVSSMKSAKRKAKNSIEKKYFDAYRKPNTKKDKEVVLPDEVKAQMDKEVADATTKAKPCIGEGNLRIIYEKYEFLVKLRNPDIQTGWYQQEALKCGVKYCRIVRSWVGTKWKYYAQLVLEGYPPIKCDSNGVVKHHVKQGRVGIDIGTQTIAFCGKDVCDLRVLAPSAIAEVCNGLTKEIARIMRQMDRSRRAMNPQYFNENGTVKRLKRKNGHKQIRHWNYSKNYYRLLHKLRNLNRKLADVRKMEHYILANELLTYGNEFIVEDMNYKALQKRNKKTKINPKTGRAHSKKRFGKSIGRCAPAMFISILNQKANRYGGSVIKVSTFETKASQFDHTDDSYTKKKLSQRFAKLSDGTVVQRDLYSAFLLLHLRKNLQSYNKKTIKKDFPQFKKLHDETKERLKSSHEWLPTSVGF

SEQ ID NO: 2550 - protein, 381 aa, unidentified
  REGION 1..381: note = Category: MG81 effectors
  REGION 1..381: note = Description: MG81-835 effector
  source 1..381: note = uncultivated organism sequence
MVSLETPLTTRTVEGGHDMARTKPTKSIIQCQLKLKLRPAQERMLNRWLWHLTAVFNWAYKTVEHNANQGIYLSRYDLESRLAFHSGRMGIPARVLDGAARTAHDAWQRCFQRLARRPRMKGRRNRLNSILFRQVINRVECDRIFVSGFGMVRFHRQEIPAGRITGARLIRRSSGWYFSLFVEASPRSIPVLSSGEIGIDPGFVSLISLSTGEKVEQALELKQTAMRLAQSQRGSDRRLTARLKEREANQRKDRNHKLSRRLLSENALICWSKDSHRAIARTFGKSVASAAHGQLRQMLAYKCRAGGREFIEVPNRYSTMTCSACGARSGPTGYAGLSVRQWTCGCGASWDRDVNAALNTLIAGRGLRLERVGDGSSGIVT

SEQ ID NO: 2551 - protein, 363 aa, unidentified
  REGION 1..363: note = Category: MG81 effectors
  REGION 1..363: note = Description: MG81-836 effector
  source 1..363: note = uncultivated organism sequence
MSIQTKTLSVRVKDRHAAVLRQMAFEVNQVFNLANEITSEAYSNAGVFGAQVPKWLTAFDVQKMTTGIQRERGYSIGSATVQEVIAHHGKARKQFKRSRLRWRVSGGARRSLGWVPFKSKQAQWQNGCVKFAGHYFKVWDSYGLAGYKFRAGSFSEDSRGRWYFNICVEVATVHTTGATAVGIDLGLKDTATVSDGSKLIAGRFYRDLQPALGKAQQAGKKARVRAIYAKIKNRRKDALHKFSTALVNSHAAIFVGDVSSSKLAKTKMAKSVLDAGWAMLKTQLEYKAIARSVVFEVVNERYSTQACSCCGAISNNSPKGRAGLRIREWTCCECGTAHDRDVNAAKNILAAGHCRLAVGIPVL

SEQ ID NO: 2552 - protein, 538 aa, unidentified
  REGION 1..538: note = Category: MG81 effectors
  REGION 1..538: note = Description: MG81-837 effector
  source 1..538: note = uncultivated organism sequence
MDNEEKEKDGATCCLTLPLKLEKWQSDHLEKRFEIARQLYNTLVHAELKKKCQVERMPEYQEIMKMIDAASNQKEKWALEKKRKAFLEENGFSRNAFKADMEKYYKHFNDNIGANVALHGITAQVWIAFDKVFVDNYKQKGKVHFKKPGELCSVQGYSQKKSGGKEIMFREDRIIWNQQGNRDRKKVKREFLLKLSPDNPYEAEMLKRHVKFVRILRKDGKTKPHWYAQLVLEGKPAVKRDPASGAPKHPIGHGVVGIDIGTRTLAYSTDKEVNLLELADRVQNIEQEKRRLQRKMDRSRRAMNPENYNSDGTFKRGVKLTRNKSKRYRRIQHQLAMIQHHQADIRKQQHNELANYLLTLGDCFFVENMSYCDLVHRANKTEISEKTGRYKRKKRFGKSIANKAPAMLITMLKQKCQSRGLEGVKEVDTHVRASQYNHQTDTCIEKALENRWNVMPDGERIQRDLYSAFLLQHCKQGLPEYNRKELKKEFGEELYRVFDREALQRDYPQFVAYHHMTIQRLSELPHTIPSMGIRRIIS

SEQ ID NO: 2553 - protein, 349 aa, unidentified
  REGION 1..349: note = Category: MG81 effectors
  REGION 1..349: note = Description: MG81-838 effector
  source 1..349: note = uncultivated organism sequence
MSTKVYRYRVKSLNGLLNKQARAVNFVWNFCNDTQKHALKWRKRWPTGFDLNVLTAGSSKELGIHSGTINAVCEQYAKSRKQFKRPYLRYRGKRSLGWVPLKGRDLKRHGDAFRFAGNTFRVFNSRPLPEGKIKDGTCFSQDRRGNWFLNIVVDVADAETRKPVRGVGIDLGLADLATLSNGEKIEHPRCFRQLEEKLAKAQRARKKRLVAKIHAKIANTRMDFLHKASTDIVRRFDYIAVGNVSSGKLAKTKMAKSVYDASWHSFKTMLAYKSVANGAWYKEVNESFSSQACSACGALPESSPKGIAGLRIREWVCSECGAVHDRDVNAALNILRSGRRAPVVGIPAL

SEQ ID NO: 2554 - protein, 512 aa, unidentified
  REGION 1..512: note = Category: MG81 effectors
  REGION 1..512: note = Description: MG81-839 effector
  source 1..512: note = uncultivated organism sequence
MPTKQKEGGNRCVLTLPLLTEPWQEHIIEKRFKIIEHLKNQLISIELRKLKNLQRTKAYKNLIKQIESVPKSERTALYKERNKMLKDAGFSQYTFMDDMAGKKSLMQKHFESHINVQIAHKAAIDVWSSFEKFLFGTGQIVHYQKRGTLSSVASKSPKTGMFYYSDENIFKWSGGGTKPKGGIILCLRVASVKTNYEKEMVANNEIKYYRVVRKWMKTKYKYYLQITFAGKPADKHREISTGRVGIDIGTQTIAIASDKSVKLLEFADKVNKNHIKKCELQRKLDRSRRYTNPDNFNPDGTVKRGTKGHKLKWNKSKHYIEIAGKIRELERKNADIRKYQHTCLANDILAMGNQIYIEPMNYKGLQKRVKETQVDEKGRYKKKKRFGKSLANKAPAMFVTILKTKAEQHGGEVYEVDIMSYRASQCDHTTGEYTKHGLNDRWRILGNGDKVQRDLYSAFLIKNSNKTHDEIDLDKCSKTYDNFKKLHDKEIENIRNEVKLRERKNISSYGIA

SEQ ID NO: 2555 - protein, 495 aa, unidentified
  REGION 1..495: note = Category: MG81 effectors
  REGION 1..495: note = Description: MG81-840 effector
  source 1..495: note = uncultivated organism sequence
MAGKSDKACCVLTLPLLTEPWQEHIIEKRFRIMEHLKNSLIALELRKLKNIQRTKQYRQLEAEISNAPKENRKTLYKKRNELLKNAGFSEFAFIDDMTNMQKHFVEHIATQIAHKSASDVWSSFEKVLFNTGRKIHFIRRGSLSSIACKKDGNGMRFRNGMLHWNGGQCKNKVKLELRVACPKTPYECAMLEKKIKYERIIRKWVKTRYKYYVQFTLDGNAVPKPRKMGTGRVGIDIGPSSIAIASSQEVRLMELADKINQNHLRKVALQQKMDRSRRATNPDNFNENKTIRRGVKLSWHYSKHYQKLRGQVRELERKNADIRKYQHTCLANYILSLGTEVYIEQMNFKGLQARAKETTYNKNGRANRKKRFGKSIANRAPAMLVTILETKLKSYAGTELHKVNTWSYRASQYDHITDTYTKKLLRQRWAELGNGDRIQRDLYSAFLLMNSQPSLQSTDRERCSKTYSQFKSLHDQEIYRLQQTPERHLSSFGIA

SEQ ID NO: 2556 - protein, 352 aa, unidentified
  REGION 1..352: note = Category: MG81 effectors
  REGION 1..352: note = Description: MG81-841 effector
  source 1..352: note = uncultivated organism sequence
MILTYKYRIKNRSAKSALRRHAFAVNQVWNYCCAQQRDIESRYRAGAPKRKWASHYDLQRLCKGAGAMFGIHQQTIGGVCRTFAQARDKARHAPAFRKSYGVRRSLGWIPFEGQSRQIKDGAVTYLGKRFYLWGLKRRPIPATVKGGAFVEDALGRWYVCLTVEVERKPATNDKAIGIDLGLKSLATLSDGRKIEAPQIYRRYEQQLATLQRAGKRRHAKRLHAKIKACRADFLHKISTELAGQNAIIAVGNVNARDLASKSVLDAGWSSFRKMLAYKAKDYREVDERFTTQDCSACGARCGPKGQKGLGIRQWQCSSCGISHDRDVNAALNILAIARRSAAPPAEEYRRAA

SEQ ID NO: 2557 - protein, 350 aa, unidentified
  REGION 1..350: note = Category: MG81 effectors
  REGION 1..350: note = Description: MG81-842 effector
  source 1..350: note = uncultivated organism sequence
MITYTLKLRLNTKQEATLNTWLFNLTGVWNWSIKKIEHNAQDKIYFSAFDFVNLLSDHGKKLGIPSHTIQGVLSQAYTAWSRCFKKIGGKPKLKGQRNKLNSVVFPDRIHPPKENHISIPGIGKIRYHKQMLPKGNIKCGRIIKRASGWYLCLFIDAERAAIIRTGYGKIGIDPGFKSLLTLSTGEKIEHPRELEAVEKRLGQAQRGHDKQLAARLSERRANQAKDRNHKLSLRLVKENVLIAFSADNHKGIAKKFGKSVSSSGHYQLQKMLSYKSRIGGTEYREIDSRNSTKTCSSCGALTGPTGLNGLSVRRWVCSACGAVLDRDINAAINTLVGAGAAHEEGLQNVA

SEQ ID NO: 2558 - protein, 350 aa, unidentified
  REGION 1..350: note = Category: MG81 effectors
  REGION 1..350: note = Description: MG81-843 effector
  source 1..350: note = uncultivated organism sequence
MVQVQLKLKLTPRQERQLNRWLCHLTAVWNWGVKKIENDARDRVFYTPKAFQNLLANHSQKVEIPSHVLQGILADAYLAWSRCFKGIARRPRLKGFRNRLNSIPLIDPVKRWPDRRISIPTLGRIRHHKQEVPEGKVKCGRIVKRASGWYLCLFIDAEPNAIPHVSDSEIGIDPGFKDLLALSSGEKMSHPRELEASALRLAQAQRGVNRKQVARLHERIANQRKDRNHKLSRRLVSENQLIAFSADNHKNIAKKFGKSVASSSHGQLRSMLAYKCRAGGREYIEVPSRNSTKTCSTCGALSGPSGWAGLKVRLWTCAHCGAEHDRDVNAAINTLKVGLGMSLELSARAA

SEQ ID NO: 2559 - protein, 341 aa, unidentified
  REGION 1..341: note = Category: MG81 effectors
  REGION 1..341: note = Description: MG81-844 effector
  source 1..341: note = uncultivated organism sequence
MIRTYRYRIKDSSAAPQLNKLAQACNFVWNFCNESQEHALRWDQRWPTGFDLNKLTAGCSKELGLHSQTVQAVCEQYETRRKQFKKRKLRWRGKRSPGWVPFKAVGVKVIEDTVRYAGHTFRFWKSRELPGPIKCGSFSQDSRKRWYVNFVIEVPEMEATTGTRHIGIDLGLKTLATCSDGRKIEAPRWYRNQQRRIAEHQRKKRSRQARNLQAKIAHRRKDFLHKESDRLTKECELIVVGDVCSSGLAKTNMAKSVNDASWSTFKHLLEYKAIARKVVYREVSERFSTQTCSGCGAIGGPKGREGLGIREWVCGECGSVHDRDVNAALNILRLGHQSLVL

SEQ ID NO: 2560 - protein, 355 aa, unidentified
  REGION 1..355: note = Category: MG81 effectors
  REGION 1..355: note = Description: MG81-845 effector
  source 1..355: note = uncultivated organism sequence
MKTLKLRIKDKHCKVLDQLASEVNFVWNYVNDLCFKHLKRKGEFLSAYDIAKYTKGTSKECNLHSQTIQAVTEELVTRRKQFKKAKLRWRVSNKKSAKKSLGWIPFKKVAIKYANGYVQYGKHQFKLWDSYGLTQYSVKTGSFVEDSRGRWYVCLVVDSPQQDKPTAIQAIGIDLGLKDIATCSDGTVISNPKFYRKYEQKLGIAQRAKNKNRVRALHAKIANCRKDHLHKASTMLVKNNALIVVGDLSAQKLVKTKMAKSVLDTGFSALKTMLKYKCENAGVMFEEVNERFTTQTCSSCLRVSNNSPKGRAGLRIRVWKCECGSVNQRDLTSSKNILALGHKRLAVGITVLSGR

SEQ ID NO: 2561 - protein, 367 aa, unidentified
  REGION 1..367: note = Category: MG81 effectors
  REGION 1..367: note = Description: MG81-846 effector
  source 1..367: note = uncultivated organism sequence
MKTLKLRIRDKHIAKLNRLSGSVNFVWNYVNDLSYKHLQKTGKFFSAYDLNEYTKGSGELLGLHSQTIQAINETHAKSRKQFKKAKLNWRTNNPTSKRKSLGWLPFKQSAIKHIATHQTGKKGLKSTLQLSLAKGQKLVIDLWDSYNLSLYQINTCELVQDSRNRWYACITVKEYPKTTCGTGSVGIDLGLKDSATASNGDKLQIKQTLKYAKALAIAQRAKNKQRVKAIHAKIKNTRQDLIHKFTTQLVKDNALIVVGDVKTTQFNSKKGTLAKSVYDAGWFEMRRQLTYKCENAGCRFEIVNEKYTTQTCSCCGDMSSSLSGRAGLRIREWTCAKCGTRHDRDINASRNILAVGLDRLVEGIPER

SEQ ID NO: 2562 - protein, 536 aa, unidentified
  REGION 1..536: note = Category: MG81 effectors
  REGION 1..536: note = Description: MG81-847 effector
  source 1..536: note = uncultivated organism sequence
MSDEEYKKLLKQYHKLSDRHILVVETDMPYPDVLKVVALSDKIRKAGNELVSLMRKNYDQLMRTKKYRKLLKLYGNTEDKDKRKALADQLNDMQKSYNVTWDLCRTSMIPIGKKYSIDAVFALTKAEDIWRGMEKCLYDNGKTTHFSKYGELPCIRAKQINRGIPMFVEDGKLRFKLRKMQFGIQVNDRFQSDEVNAVLSYLENPDKMDADAVNTLIEEACCIDTYRPCYATLVPRLIRGKYRVYLHLTIEGKAKPKYDRSGNPRHKYGKGMIGADIGTQTVAYTSDTEVGLKNLSERGNSIQTSERKERLYYRAMDRSRRATNPQNYNPDGTIKKGKKTWKYSDRYKKLKAKHAELCRINAVNKQIAINEDANYLRSLGDTFVTEPKNASKLMKRAKKTTVNSKGRFNKKKRFGKSIKNRCPPGFQTTVEKKFKVTGGAYIEVPNNYRASQYDHTADDYIKKKLSDRLYRLRDGTLVQRDWYSSFLLYCYDYRTQDIDKDKCITDFGRCYDKEKALIAWIKANHIKILNSGIKVA

SEQ ID NO: 2563 - protein, 536 aa, unidentified
  REGION 1..536: note = Category: MG81 effectors
  REGION 1..536: note = Description: MG81-848 effector
  source 1..536: note = uncultivated organism sequence
MSDEEYKKLLKQYHKLSDRHILVVETDMPYPDVLKVVALSDKIRKAGNELVRLMRKNYDQLMRTKKYRKLLKLYGNTEDKDKRKALADQLNDMQKSYNVTWDLCRTSMIPIGKKYSIDAVFALTKAEDIWRGMEKCLYDNGKTTHFSKYGELPCIRAKQINRGIPMFVEDGKLRFKLRKMQFGIQVNDRFQSDEVNAVLSYLENPDKMDADAVNTLIEEACCIDTYRPCYATLVPRLIRGKYRVYLHLTIEGKAKPKYDRSGNPRHKYGKGMIGADIGTQTVAYTSDTEVGLKNLSERGNSIQTSERKERLYYRAMDRSRRATNPQNYNPDGTIKKGKKTWKYSNRYKKLKAKHAELCRINAVNRQLAINEDANYLRSLGDTFVTEPKNASKLMKRAKKTTVNSKGKFNKKKRFGKSIKNRCPSGFQTTVEKKFKVTGGAYIEVPNNYRASQYDHTADDYIKKKLSDRLYRLRDGTLVQRDWYSSFLLYCYDYRTQDIDKDKCITDFGRCYDKEKALIAWIKANHIKILNSGIKVA

SEQ ID NO: 2564 - protein, 536 aa, unidentified
  REGION 1..536: note = Category: MG81 effectors
  REGION 1..536: note = Description: MG81-849 effector
  source 1..536: note = uncultivated organism sequence
MSDEEYKKLLKQYHKLSDRHILVVETDMPYPDVLKVVALSDKIRKAGNELVRLMRKNYDQLMRTKKYRKLLKLYGNTEDKDKRKALANQLNDMQKSYDVTWDFCRTSMIPIGKKYSIDAVFALTKAEDIWRGMEKCLYDNGKTTHFSKYGELPCIRAKQINRGIPMFVEDGKLRFKLRKMQFGIQVNDRFQSDEVNAVLSYLENPDKMDADAVNTLIEEACCIDTYRPCYATLVPRLIRGKYRVYLHLTIEGKAKSKYDRFGNPRHKYGKGMIGADIGTQTVAYTSDTEVGLKNLSERGNSIQTAERKERLYYRAMDRSRRATNPQNYNPDGTIKKGKKTWKYSDRYKKLKAKHTELCRINAVNRQLAINEDANYLRSLGDTFVTEPKNASKLMKRAKKTTVNSKGKFNKKKRFGKSIKNRCPSGFQTTIEKKFKVTGGAYIEVPNNYRASQYDHTADDYIKKKLSDRLYRLRDGTLVQRDWYSSFLLYCYDYRTQDIDKDKCITDFGRCYDKEKALIAWIKANHIKILNSGIKVA

SEQ ID NO: 2565 - protein, 512 aa, unidentified
  REGION 1..512: note = Category: MG81 effectors
  REGION 1..512: note = Description: MG81-850 effector
  source 1..512: note = uncultivated organism sequence
MPTKQKEDSNRCVLTLPLLTEPWQEHIIEKRFKIIEHLKNQLISIELRKLKNLQRTKAYKNLIKQIESVPKSERTVLYKERNKMLKDAGFSQYTFMDDMAGKKSLMQKHFESHINVQIAHKAAIDVWSSFEKFLFGTGQIVHYQKRGTLSSVASKSPKTGMFYYPDENIFKWSGGGTKPKGGIILCLRVASVKTNYEKEMVANNEIKYYRVVRKWMKTKYKYYLQITFAGKPADKHREISTGRVGIDIGTQTIAIASDKSVKLLELADKVNKNHIKKCELQRKLDRSRRYTNPDNFNPDGTVKRGTKGHKLKWNKSKHYIEIAGKIRELERKNADIRKYQHTCLANDILAMGNQIYIEPMNYKGLQKRVKETQVDEKGRYKKKKRFGKSLANKAPAMFVTILKTKAEQHGGEVYEVDIMSYRASQCDHTTGEYTKHGLNDRWRILGNGDKVQRDLYSAFLIKNSNKTHDEIDLDKCSKTYDNFKKLHDKEIENIRNEVKLRERKNISSYGIA

SEQ ID NO: 2566 - protein, 416 aa, unidentified
  REGION 1..416: note = Category: MG81 effectors
  REGION 1..416: note = Description: MG81-851 effector
  source 1..416: note = uncultivated organism sequence
MIWLEKKSLMQKHFESHINVQIAHKAAIDVWSSFEKFLFGTGQIVHYQKRGTLSSVASKSPKTGMFYYSDENIFKWSGGGTKPKGGIILCLRVASVKTNYEKEMVANNEIKYYRVVRKWMKTKYKYYLQITFAGKPADKHREISTGRVGIDIGTQTIAIASDKSVKLLELADKVNKNHIKKCELQRKLDRSRRYTNPDNFNPDGTVKRGTKGHKLKWNKSKHYIEIAGKIRELERKNADIRKYQHTCLANDILAMGNQIYIEPMDYKGLQKRAKETQVDEKGRYKKKKRFGKSLANKAPAMFVTILKTKVEQHGGEVYEVDIMSYRASQCDHTTGEYTKHGLNDRWRILGNGDKVQRDLYSAFLIKNSNKTHDEIDLDKCSKTYDSFKKLHDTEIENIRNEVMLRERKNISSYGIA

SEQ ID NO: 2567 - protein, 512 aa, unidentified
  REGION 1..512: note = Category: MG81 effectors
  REGION 1..512: note = Description: MG81-853 effector
  source 1..512: note = uncultivated organism sequence
MPTKQKEGGNRCVLTLPLLTEPWKEHIIEKRFKIIEHLKNQLISIELRKLKNLQRTKAYKNLIKQIESVPKSERTVLYKERNKMLKDAGFSQYTFMDDMAGKKSLMQKHFESHINVQIAHKAAIDVWSSFEKFLFGTGQIVHYQKRGTLSSVASKSPKTGMFYYSDENIFKWSGGGTKPKGGIILCLRVASVKTNYEKEMVANNEIKYYRVVRKWMKTKYKYYLQITFAGKPADKHREISTDRVGIDIGTQTIAIASDKSVKLLELADKVNKNHIKKCELQRKLDRSRRYTNPDNFNPDGTVKRGTKGHKLKWNKSKHYLEIAGKIRELERKNADIRKYQHTCLANDILAMGNQIYIEPMNYKGLQKRAKETQVDEKGRYKKKKRFGKSLANKAPAMFVTILKTKAEQHGGEVYEVDIMSYRASQCDHTTGEYTKHGLNDRWRILGNGDKVQRDLYSAFLIKNSNKTHDEIDLDKCSKTYDNFKKLHDKEIENIRNEVILRKRRNISSYGIA

SEQ ID NO: 2568 - protein, 512 aa, unidentified
  REGION 1..512: note = Category: MG81 effectors
  REGION 1..512: note = Description: MG81-854 effector
  source 1..512: note = uncultivated organism sequence
MPTKQKEGGNRCVLTLPLLTEPWQEHIIEKRFKIIEHLKNQLISIELRKLKNLQRTKAYKNLMKRIEFVPKSERTALYKERNKMLKDAGFSQYTFMDDMAGKKSLMQKHFESHINVQIAHKAAIDVWSSFEKFLFGTGQIVHYQKRGTLSSVASKSPKTGMFYYSDENIFKWSGGGTKPKGGIILCLRVASVKTNYEKEMVANNEIKYYRVVRKWMKTKYKYYLQITFAGKPADKHREISTGRVGIDIGTQTIAIASDKSVKLLELADKVNKNHIKKCELQRKLDRSRRYTNPDNFNPDGTVKRGTKGHKLKWNKSKHYIEIAGKICELERKNADIRKYQHTCLANDILAMGNQIYIEPMNYKGLQKRVKETQVDEKGRYKKKKRFGKSLANKAPAMFVTILKTKAEQHGGEVYEVDIMSYRASQCDHTTGEYTKHGLNDRWRILGNGDKVQRDLYSAFLIKNSNKTHDEIDLDKCSKTYDSFKKLHDKEIENIRNEVKLRERKNISSYGIA

SEQ ID NO: 2569 - protein, 469 aa, unidentified
  REGION 1..469: note = Category: MG81 effectors
  REGION 1..469: note = Description: MG81-855 effector
  source 1..469: note = uncultivated organism sequence
MPTKQKEGGNRCVLTLPLLTEPWQEHIIEKRFKIIEHLKNQLISIELRKLKKLQRTKAYKNLIKQIESVPKSERTVLYKERNKMLKDAGFSQYTFMDDMAGKKSLMQKHFESHINVQIAHKAAIDVWSSFEKFLFGTGQIVHYQKRGTLSSVASKSPKTGMFYYSDENIFKWSGGGTKPKGGIILCLRVASVKTNYEKEMVANNEIKYYRVVRKWMKTKYKYYLQITFAGKPADKHREISTGRVGIDIGTQTIAIASDKSVKLLELADKVNKNHIKKCELQRKLDRSRRYTNPDNFNPDGTVKRGTKGHKLKWNKSKHYLEVAGKIRELERKNADIRKYQHTCLANDILAMGNQIYIEPMNYKGLQKRAKETQVDEKGRYKKKKRFGKSLANKAPAMFVTILKTKAEQHGGEVYEVDIMSYRASQCDHTTGEYTKHGLNDRWRILGNGDKVQRDLYSAFLIKNSNKTHD

SEQ ID NO: 2570 - protein, 537 aa, unidentified
  REGION 1..537: note = Category: MG81 effectors
  REGION 1..537: note = Description: MG81-856 effector
  source 1..537: note = uncultivated organism sequence
MISDEEYKKLLKQFHKLSDRHILVVETDMPYSDVLKVVILSDKIRKAGNELVSFMRKNYDQLIRTKKYRKLLKLYGSTKDKKKRKDLADQLNEMQKAYNVTWDYCRKSMIPIGKKYGIDAVFALTKAEDVWRGIEKCLYGNGKAIHFSKYGELPCIRAKQINRGISISVKDDRLQFKLGKTAFGIQVNDRFQQDEVDAVLTYLAEPEIVDNKAVNTLIEDAYYIDTYRPCYATLVIKMIRGKYRVYLHLTIEGKTKLKYDKHGNPRHKYGKGVIGADIGTQTVAYTSDTEVGLKNLSERGNSIQTSERKERLLYRAMDRSRRAANPQNYNEDGTVKKGRKTWKYSNHYKKLKAKHSELCRINAVNRQLAINEDANHLRSLGDTFVTEPKNASKLMKRAKETAVNDKGRFNKKKRFGKSIKNRCPSGFQTTVEKKFKTTGGTYIEVPNNYRASQYDHTVDDYIKKKLSDRLYKLQDGTEVQRDWYSSFLLYCYDYKIQNIDKNKCITKFDNCYKKEKALITWIKAHKIKVLNSGIKIA

SEQ ID NO: 2571 - protein, 364 aa, unidentified
  REGION 1..364: note = Category: MG81 effectors
  REGION 1..364: note = Description: MG81-857 effector
  source 1..364: note = uncultivated organism sequence
MVKTFSFRIKDSTSHKYLHAMARAVNYVWNYCNDIQKKAARSNRRWVNWVMLNNLTSGCSKELRLHSQTIQAIGECYATSLKEAKSPTGKKKRFLRFRGRRSQGWIPFKASGIKLRGDSAVYQGRRFKFWKTRDIPPTIKNGNFSCDSRGRWYLNLVCEYEETIVSNEGNVGIDLGLKSLATLSTGKKYDAQKFFRKYERKLAHHQRCNNSRQVQTIHAKIANSRKDFNHKVSHELTRDFNKIFVGDVGSLGLLKTKLAKSVSDASWGQLRTFIEYKAIARGGTYYVVDENNTTRTCSACGCLTGPSGLAGLRVREWQCKECGTVHDRDTNSAINIEQRGLLTLPSPLRTLSAKDSESLGIPRL

SEQ ID NO: 2572 - protein, 1268 aa, unidentified
  REGION 1..1268: note = Category: MG81 effectors
  REGION 1..1268: note = Description: MG81-858 effector
  source 1..1268: note = uncultivated organism sequence
MKVSKVNHRRAAVAVNKKSVTVNGILYDAPVKKNVKTGNMSAYVSSKYVIDNVVKNSSRLYSPFSSKRIVIDREKIRIADRLKQCYDNFVKYYLSNGSLNEQQMRFNPNNTYMADSRVHFCVPSGIDIESLINSIVDCSLRKSLKRTYRFETNYGEKNTFNLPDLVKKSIKIYCTDEKRKLNDREEQEMYVLFSYMYEDKYKDRQKVLIANSISNQATKVKVCDDESRLIKLSIADTKKKPLWDFIVDYANSDKNGQYTILRNIRKSIVLFVCGVDVYRNIENNDNLDIWKWEEYGIQESQLFVKIENCYTTKGEDIALNEIRNVNLDHYMKAIGVLDDERSKFWFQHYENTIEALFSKKSKRKIERIKTAYLCEYLWKNFCSYVALKYVDLGKGVYHFTMSDKLSLMNKNTNENGIKFGEVDSRFNKGISSFDYERIKAEETIDRNISTYTTFATNIFAKSVIKDSYRQKKAGNSDALQYDDETYYNRKAMNPYALKRVLRYWGGQSRWKSELEELNVAELCIDIKNRLSKIRNSGVHYTSTSALKGNDDDSIVGMLIKKDFDDIKDVYASKYYSNNVWMFYNTDKISKMMEYLYQDDSNIRDAQIPAFNSVIKRKDMAEVIEKIIKKNSYKTIKEPYQREKYRSCLYFMLKEIYYNRFIKQDNLKDQVIQIIDSNTELIGDNSRAVDNLKKRIHDVDSQTMSFGELCQVIMTDYNMQNQENKSIKSKERQDKDRKNGIDNSYKHFPLLLHHLIKVSFLKFIKTDEKLAFIREPRITELDKTLEQFEAQIQTVDIYNSLKMMVAENKSLLDWYTLAHFLMPKQLNHLIGDVKNYIQYLSNIDKRAGSVKNNKSASTEVKIRQYSEIVRILDFSLQYIGRVSNDVTDYFVDEDEYAAFLSKYVEFSGNDIVSMKAFCQSRTANGKHTIGLYCDGANPIMNRNIAYAKMYGNDEILSYIYNKVTKKDIEKYYVSQDNLEKVFADGKCQDVQQQNALCDFQKMKNHIELTEVSIYTDILNDFMAQFISWAYLRERDLMYFQLGLNYIRMFYGTYELEEKYYKLHGENINIEKGALLYQIVAMYSHELPIYKVDESGIAILAEKQGSSGASIKSFVTEYCKEEMKKAYTYENGLELFEDVNQHDDLSKLRNDFAHMRYMSARDKSIMDIVSEIYNGFFIYDTKLKKSVSFIFKNILMRYAVDVNIEFCHKGDNEDTNNLIRIKDEVGLYSDKYTYKVEDNDTVDIEVRNSEFLEQLKKLLEYKKESEGSEL

SEQ ID NO: 2573 - protein, 1268 aa, unidentified
  REGION 1..1268: note = Category: MG81 effectors
  REGION 1..1268: note = Description: MG81-859 effector
  source 1..1268: note = uncultivated organism sequence
MKVSKVNHRRAAVAVNKKSVTVNGILYDAPVKKNVKTGNMSAYVSSKYVIDNVVKNSSRLYSPFSSKRIVIDREKIRIADRLKQCYDNFVKYYLSNGSLNEQQMRFNPNNTYMADSRVHFCVPSGIDIESLINSIVDSSLRKSLKRTYRFETNYGEKNTFNLPDLVKKSIKIYCTDEKRKLNDREEQEMYVLFSYMYEDKYKDRQKVLIANSISNQATKVKVCDDESRLIKLSIADTKKKPLWDFIVDYANSDKNGQYTILRNIRKSIVLFVCGVDVYRNIENNDNLDIWKWEEYGIQESQLFVKIENCYTTKGEDIALNEIRNVNLDHYMKAIGVLDDERSKFWFQHYENTIEALFSKKSKRKIERIKTAYLCEYLWKNFCSYVALKYVDLGKGVYHFTMSDKLSLMNKNTNENGIKFGEVDSRFNKGISSFDYERIKAEETIDRNISTYTTFATNIFAKSVIKDSYRQKKAGNSDALQYDDETYYNRKAMNPYALKRVLRYWGGQSRWKSELEELNVAELCIDIKNRLSKIRNSGVHYTSTSALKGNDDDSIVGMLIKKDFDDIKDVYASKYYSNNVWMFYNTDKISKMMEYLYQDDSNIRDAQIPAFNSVIKRKDMAEVIEKIIKKNSYKTIKEPYQREKYRSCLYFMLKEIYYNRFIKQDNLKDQVIQIIDSNTELIGDNSRAVDNLKKRIHDVDSQTMSFGELCQVIMTDYNMQNQENKSIKSKERQDKDRKNGIDNSYKHFPLLLHHLIKVSFLKFIKTDEKLAFIREPRITELDKTLEQFEAQIQTVDIYNSLKMMVAENKSLLDWYTLAHFLMPKQLNHLIGDVKNYIQYLSNIDKRAGSVKNNKSASTEVKIRQYSEIVRILDFSLQYIGRVSNDVTDYFVDEDEYAAFLSKYVEFSGNDIVSMKAFCQSRTANGKHTIGLYCDGANPIMNRNIAYAKMYGNDEILSYIYNKVTKKDIEKYYVSQDNLEKVFADGKCQDVQQQNALCDFQKMKNHIELTEVSIYTDILNDFMAQFISWAYLRERDLMYFQLGLNYIRMFYGTYELEEKYYKLHGENINIEKGALLYQIVAMYSHELPIYKVDESGIAILAEKQGSSGASIKSFVTEYCKEEMKKAYTYENGLELFEDVNQHDDLSKLRNDFAHMRYMSARDKSIMDIVSEIYNGFFIYDTKLKKSVSFIFKNILMRYAVDVNIEFCHKGDNEDTNNLIRIKDEVGLYSDKYTYKVEDNDTVDIEVRNSEFLEQLKKLLEYKKESEGSEL

SEQ ID NO: 2574 - protein, 1073 aa, unidentified
  REGION 1..1073: note = Category: MG81 effectors
  REGION 1..1073: note = Description: MG81-860 effector
  source 1..1073: note = uncultivated organism sequence
MQVRDDVILGLDIGVGSLGWALLEEDLQTGEQRLLQRQTPQGETTYALGVRLFHVPENAKTKELLNVKRRTARMQRRTTARRAQRMRRVRALLDSLGVPGVRDADAFHLGKGRGAQCDPWQLRREGLERRLEAREWAVVLLHIAKHRGFRSNSKTDRSGSDKEMGQVLQAVSNLQQEVEASGLTVGALLASRERRRNRADHTGAPRYDLCMLRSLQENEVDILFTRQRELDNPLAGEEVRCRYAELAFAQRPLAPVSHMVGPCAFLEGERRAPRFAPTAELFRYVQALCNMRLRQETGEETPLSEEQRQAACTVFGSVQSVTYKKLRQVLRLPAGCRFAGLSYGVTEKGNVQDPEKADVVMRTGKCCQGTACLRGILGDAYEALHEQRLDEADAARLAATGALSAPAAALLARGMAGLRLTDAVARIVSELNDLDQIRAVLALLPLAAPRIAALSQAAGEGKLGIFQGTARLSLRAMEAILPHMLACGEYAAACELAGFDPRAAQKTDVTDIRNPVVLRVFREVRRQFSAICREFGFLPGRVHVELLREVGKSGEERNRISRGLERRTKEKEAARKAVAQLLGKSPETVSAGEVQRYELWRQQDGKCAYYMLWRHAGGERAYGDAMPQGSIPPDWLADGVNAVQVDHILPRSRTFDNSFHNLCLCCHAANQAKGGRTPWEWLGAAQPQAWHDFEQWVQSLPLKGLKKRNYLLRDLNAEVQGRFHARNLTDSGYVARLTLRWLEEEYARHDVPMQDADGRTRRRFFARPGQVTDFLRRHWGVQALKKIDGQRSGDRHHALDALLVAACSEGMLQRMVRAFQREENGPERLHIPCPWQDFSATVGRALGSVFVSRVERGRTKGPLHEETLRAIREERQPDGETRRVLYERKAVARLTAADLDKIKDAARCPDVVAALRRWLDAGKPGDALPRSAHGDIIRHVRVCAGEFSSGVVLQRGSGQAQASNGGMVRTDIYSRDGKFYMVPVYAKDVADKRLPLRACVAAKAEKDWREMTADYRFLFSLTPDCYVLTENRKGEVKEGYFAGANRNTSAISLSLAHDKQNVIQHRHHHVKAF

SEQ ID NO: 2575 - protein, 1098 aa, unidentified
  REGION 1..1098: note = Category: MG81 effectors
  REGION 1..1098: note = Description: MG81-861 effector
  source 1..1098: note = uncultivated organism sequence
MQVHDDVILGLDIGVGSLGWALLEEDLQTGEQRLLQRQTPQGETTYALGVRLFHVPENAKTKELLNVKRRTARMQRRTTARRAQRMRRVRALLDSLGVPGVRDADAFHLGKGRGAQCDPWQLRREGLERRLEAREWAVVLLHIAKHRGFRSNSKTDRSGSDKEMGQVLQAVSNLQQEVEASGLTVGALLASRERRRNRADHTGAPRYDLCMLRSLQENEVDILFTRQRELGNPLAGEEVRCRYAELAFAQRPLAPVSHMVGPCAFLEGERRAPRFAPTAELFRYVQALCNMRLRQETGEETPLSEEQRQAACAVFGSVQSVTYKKLRQVLRLPAGCRFAGLSYGVTEKGNVQDPEKADVVMRTGKCCQGTACLRGILGDAYEALHEQRLDEADAARLAATGALSAPAAALLARGMAGLRLTDAVARIVSELNDLDQIRAVLALLPLAAPQIAALSQAAGEGKLGIFQGTARLSLRAMEAILPHMLACGEYAAACELAGFDPRAAQKTDVTDIRNPVVLRVFREVRRQFSAICREFGFLPGRVHVELLREVGKSGEERNRISRGLERRTKEKEAARKAVAQLLGKSPETVSAGEVQRYELWRQQDGKCAYYMLWRHAGGERAYGDAMPQGSIPPDWLADGVNAVQVDHILPRSRTFDNSFHNLCLCCHAANQAKGGRTPWEWLGAAQPQAWHDFEQWVQSLPLKGLKKRNYLLRDLNAEVQGRFHARNLTDSGYVARLTLRWLEEEYARHDVPMQDADGRTRRRFFARPGQVTDFLRRHWGVQALKKIDGQRSGDRHHALDALLVAACSEGMLQRMVRAFQREENGPERLHIPCPWQDFSATVGRALGSVFVSRVERGRTKGPLHEETLRAIREERQPDGETRRVLYERKAVARLTAADLDKIKDAARCPDVVAALRRWLDAGKPGDALPRSAHGDIIRHVRVCAGEFSSGVVLQRGSGQAQASNGGMVRTDIYSRDGKFYMVPVYAKDVADKRLPLRACVAAKAEKDWREMTADYRFLFSLTPDCYVLTENRKGEVKEGYFAGANRNTSAISLSLAHDKQNVIQGIGITTLKRFEKYRVDRFGRLSLVRREADPRGRS

SEQ ID NO: 2576 - protein, 1098 aa, unidentified
  REGION 1..1098: note = Category: MG81 effectors
  REGION 1..1098: note = Description: MG81-862 effector
  source 1..1098: note = uncultivated organism sequence
MQVRDDVILGLDIGVGSLGWALLEEDLQTGEQRLLQRQTSQGETTYALGVRLFHVPENAKTKELLNVKRRTARMQRRTTARRAQRMRRVRALLDSLGVPGVRDADAFHLGKGRGAQCDPWQLRREGLERRLEAREWAVVLLHIAKHRGFRSNSKTDRSGSDKEMGQVLQAVSNLQQEVEASGLTVGALLASRERRRNRADHTGAPRYDLCMLRSLQENEVDILFTRQRELGNPLAGEEVRCRYAELAFAQRPLAPVSHMVGPCAFLEGERRAPRFAPTAELFRYVQALCNMRLRQETGEETPLSEEQRQAACTVFGSVQSVTYKKLRQVLRLPAGCRFAGLSYGVTEKGNVQDPEKADVVMRTGKCCQGTACLRGILGDAYEALHEQRLDEADAARLAATGALSAPAAALLARGMAGLRLTDAVARIVSELNDLDQIRAVLALLPLAAPRIAALSQAAGEGKLGIFQGTARLSLRAMEAILPHMLACGEYAAACELAGFDPRAAQKTDVTDIRNPVVLRVFREVRRQFSAICREFGFLPGRVHVELLREVGKSGEERNRISRGLERRTKEKEAARKAVAQLLGKSPEAVSAGEVQRYELWRQQDGKCAYYMLWRHAGGERAYGNAMPQGSIPPAWLADGVNAVQVDHILPRSRTFDNSFHNLCLCCHAANQAKGGRTPWEWLGAAQPQAWHDFEQWVQSLPLKGLKKRNYLLRDLSAEVQGRFHARNLTDSSYVARLTLRWLEEEYARHDVPMQDAEGRTRRRFFARPGQVTDFLRRHWGVQALKKIDGQRSGDRHHALDALLVAACSEGMLQRMVRAFQREENGPERLHIPCPWQDFSTTVGRALGSVFVSRVERGRTKGPLHEETLRAIREERQPDGETRRVLYERKAVARLTAADLDRIKDAARCPDVVAALRRWLDAGKPGDDLPRSAHGDIIRHVRVRAGEFSSGVILQRGSGQAQAKNGGIVRTDIYSRDGKFYMVPVYAKDVADKRLPLRACVAHKDEKDWLELTEDYHFLFSLTPDCYVLTENRKGEVKEGYFEGPDRGSANISLSLAHDKKNTIRGIGIQNLKRFEKYRVDRFGRLSLVRREADPRGRS

SEQ ID NO: 2577 - protein, 1134 aa, unidentified
  REGION 1..1134: note = Category: MG81 effectors
  REGION 1..1134: note = Description: MG81-863 effector
  source 1..1134: note = uncultivated organism sequence
MKYVIGMDIGIGSIGWSVIRSDADCKRIEDFGVRIFDPGENASDRKSNSQIRHEYRSVRRVLRRRKHRKELLKAHLENIGLTTIDRINEYFKHADGDIISLRVKGLDKKLAPEEIAACLINIANRRGYRPFYEKEELSQYEKTSLNKTRQFMLSGEYRTSAEMILKNEQFDSEESEYRSYRNRSGNEETVLIERKWLRDEVEKILKKQSEFYPCLNDRNTNAIKRIIFDQRDFEDGPGDKNDPFRRYTGFLESMGQCRFYPDEKRGYRATLTADTYSLVNELSQYSYVDENGCFVFDSALAHDLIESALKNAKFTKSDFNKICKAHGIVPIYGGKGKDTDISRCFKFLKAIKPILEADGFDWETVCNIDTASDPDSILNRIGIIVSENITPARRKKALKNLNILNDDSITALCNYKFGGTSSVSYKYMSGAIEAFLKGDIYGKHQASHIEETATESVKHTKLPVFDKDFEFFKNPVVFRAINESRKVINAIIEKYGSPSAINIEVGSEVSRSFANRTADKNEQTKRMKEKDAAKKAIAELLGVDIASVTSKMIDRYFLGELQGWKCLYSGKEINKEECLRGSKAYEIDHIVPFSLILDNTLNNKALVLTNENQLKKQQTPLMYLSGERRKKFIGTVNELFRAKKIKKKKYAYLLQPDLNDEKMSEWKSRNLNDMRYISRFMVGYLKENLKFDNSSKSEGRWQNVYAVKGSLTSMFRKLWLNETTWGRADKASIKAETYLDHAVDAVVIGNCLPVYVEIAQVNLRLRDIYKSNGRQFVAEYWDCFNKGVEMISRYYNIDKDTVRAFLKKSDRIPSLIPDLREEVDRRFVDHAIYSKYQKEIADHEGKDFEKPTYEEAEQAYRTSMENLYPTDLQFAHSLSMPLISCKPERKFSGKITADNPVKLREIDGKLYTLSKKEIGKIERKDIEKIYTSDTQLIAYLIELFDGAKDTATLGDIMKEKGISEIRTKNGNAIRKLTLRNICNKDFLKKEIDENNYTYLDTAKYYCVELYKDIKNQLQVQGIKRADIILQNGKLCLAPWYKQPDDYFKHVMYLQKNDYLKVYKNGKLSFCGYYRSAAGLTNSRLYFIIDNQPEDKKKYITLKLEVKKYSVDILGKIGKKEIKCGEPLSSAKVKK

SEQ ID NO: 2578 - protein, 1323 aa, unidentified
  REGION 1..1323: note = Category: MG81 effectors
  REGION 1..1323: note = Description: MG81-864 effector
  source 1..1323: note = uncultivated organism sequence
MKVSKVDHTSAGVTSKKDITYNGLLYRNPPKKGVNEILKDAETDEKILENMENYITRLNNRASSLYSVFNPIGNEKSQAKNPEQKDLYQNISSYFTEFVRDIKNNSADTASRNLLNRSFTVNSDKETIDNFVARYLRKSLQKRVNGYELSEIIRNIIYLKANLYRKEDVPVKEVCILAEAIKEDITKERQIKKMAASIVKQDVKIQTYLSDDGKVLLRHTFAKHSKKSALFRFLQRFTSVDIEEQEEMIRELRALVVLFYCGPNAYKEAQGDGIGVWTFGKTASDVRVNFCEEACRLITEYQAELERVETEKKEKSSNVKPVNTDIYKEKIKKAIRYSIAGSYQEAARTLKETEGFEDKRLWLGLIEEYAERILLSNRRFMDPGTQNCEFLCKRTMQMLISYIAMKLVDLGKAVYHFAMPAQIDVTNGKSAEFGEVQPSFRDGITSFDYEWIKAEESLTRELSTYSVFAVRNFLNSISKKESDIIAVNLNDVESGNLKSNSVMRVLRYFGGKKEWQDTYIGEVSENELINALRKEIGAARNSTFHYAGTIDNGITDDDKLIISQIYEKEHGDIGRIRRKKYYSNNALMFYKKTDIDALMDYLYSAPKDHPAQIPAFNKILNKNKVYEFSKFIKGNPKKKISTAGKTEELKGCVFYMLKECYYYGFLPDSRSAQFVKEALEDIVKSAEDADPAATDRRLEAAQNFKKRFYEISEKASLGQICQRIMTDFQLQNGGQKKGQSSKYAKKGVGEPIYQHFRMMLYDILRKAFWKYLNTLTETGEMNFMFMREPSYKPEFAAEEEFCKDWNDHSYDDIREGMEEDSYLEAWFTAAHFIAPAQLNHLIGSFKKYEQFTSDIKYRAEGNGIDCNSRWQSRIQEDEMHRLLRVLEFVQMTSGTFSKEISDYYGRDEDSAIEEYAEFVENFVEFSTKKMPNKHVALQTFCNTAVKSGSPNGKIGIYYDGEKPILNRNIVMADMYGNVSLISNCMKKVTEREIKVFYNDMNNLTEVFKRGVCQNEDEQKRLKAFQNNKNRVELLDVAIYTEIVNELYAQLVSWSYLRERDLMYYQLGVNYMKLFNGNSVPKDSFLRIIQGNGANITEGAVLYQLVAMNSFGWPLLCRDGSADKKANTTGQKVASFFMDYCRKDASIYESCLMLFERLQSHDAIIKEIRNPIDHMHYFEKGKNGATKSILEMYGDIYDRFFDYDLKLKKSVSFVLQNILLDHFIIAHTVMNRQEGKYKYKNKDGQEKSYTGTKLAIRPNREQKKKVFDKTIRKMKEISIIHYGMESDILTYKIKKDGKPVLVKADARSRMFLDQMQRILEYSKT

SEQ ID NO: 2579 - protein, 1034 aa, unidentified
  REGION 1..1034: note = Category: MG81 effectors
  REGION 1..1034: note = Description: MG81-865 effector
  source 1..1034: note = uncultivated organism sequence
MARVLGLDIGIGSCGWAVVETPEIDEATGKVQGEAAIVACGTRCFDVPEEPKTKELKNKTRRLLRGQRRVLRRRRQRIAQIRRLLATHGLPADPGPLPAGAPGDLVWRLRAQGLDRRLEPAEWARVLIHIANHRGFKSNSKRDRGNKSESGKMLKAIAATGQKLADWRSFGEMLARDPDFAARKRNRTGEYALTPLRADLEREVARLFEAQRRLANPASSPALEAAYRELAFAQRPVAAREPPVGRCAFLEGEKRAPRHAPSFERFRFLAKLATVKVIPMGERPRFLTDEERPRAIGLLGRQELVTYKALRNALELPPSTVFADLPQRKADPESAPFARFDGTLALREGLGKRRFTELLRSAPEKLDAAMEALVWLDDLDQIRARLAASGLDPADVAALTGDEALARFAGFKGAGHISTAACRALIPHLEHGRGYAEACAALGWDHAKAGVPRIEEVANPVVRKILRECTRQIAVVLAEHGPVDAVHLEMARDVGKSAEERNEIRKGMDERAAQRDRHREEFRKLLGHAPNDEELLRYELWKEQNHRCPYTFPDEAAYIPPECLLATDNRVQVDHILPYSRSGDDSFRNKVLCYVRANQEKRRRTPYEWLGDDPQRWRLFEARIAGLADMHHQKRRKLLMRTFADREQAYRARHLQDTRYAMRVLRFALEAQFPTDARRRLFPRPGAITALLRRAWGLDELKKGGALGDRDHALDAIVVAFTTESLLNRLTRLHQELEEIGSGRATPLVETPLGSSPQARERFRQMVKAAAEGVFVSRPETRRGRGPAHDATLYGFERTPEGQEIQYERKNVWELKAADLDRLKGDPARHRVLREVLGAWLQRAEERRVKPEKLWREEPPRLPNGPPVRSVVLVRAKTTAGVKLQRGNALAHADQASMVRVDVFTKGGKFFLVPIYAWQVAKLETPPFLAIKSLADEDGWYPIDDTYAFLWSLYPGSFIKAVNRKGERFEGYFRSLDRSNGRISFSPPGNGDSKAQERFTTKTLQVFEKYHVDRLGRLHRIEREPRLWHGAVCS

SEQ ID NO: 2580 - protein, 1098 aa, unidentified
  REGION 1..1098: note = Category: MG81 effectors
  REGION 1..1098: note = Description: MG81-866 effector
  source 1..1098: note = uncultivated organism sequence
MQVRDDVILGLDIGVGSLGWALLEEDLQTGEQRLLQRQAPQGETSYALGVRLFNVPENAKTKELLNVKRRTARMQRRTTARRAQRMRRVRALLDSLGVLGVRDADAFHLGKGRGAQCDPWQLRREGLERRLEAREWAVVLLHIAKHRGFRSNSKTDSSGSDKEMGQVLQAVSNLQQEVEASGLTVGALLASRERRRNRADHTGAPRYDLCMLRSLQEDEVNILFTRQRELGNPLAGEDIRCRYAELAFAQRPLAPVSHMVGPCAFLEGERRAPRFAPTAELFRYVQALCTMRLRQETGEETPLSEEQRQAACAVFGSVQSVTYKKLRQVLRLPAGCRFVGLSYGVTEKGKVQDPEKADVVMRTGKCCQGTACLRGILGDAYDALHEQRLDEADAARLAATDALSAPAAALLARGMAGLRLTDALVRIVSELNDLGQIRAILALLPLPAPRIAALSQAAGEGKLGFFQGTARLSLRAMEAILPHMQACGEYAAACELAGFDPRAAQKTDVTDIRNPVVLRVFREVRRQFSAICREFGFLPGRVHVELLREVGKSGEERNRISRGLERRTKEKEAARKAVAQLLGKSPEAVSAGEVQRYELWRQQDGKCAYYMLWRHAGGERAYGNAMPQGSIPPAWLADGVNAVQVDHILPRSRTFDNSFHNLCLCCHAANQAKGGRTPWEWLGAAQPQAWHDFEQWVQSLPLKGLKKRNYLLRDLSAEVQGRFHARNLTDSSYVARLTLRWLEEEYARHDVPMQDAEGRTRRRFFARPGQVTDFLRRHWGVQALKKIDGQRSGDRHHALDALLVAACSEGMLQRMVRAFQREENGPERLHIPCPWQDFSATVGRALGSVFVSRVERGRTKGPLHEETLRAIREERQPDGETRRVLYERKAVARLTAADLDRIKDAARCPDVVAALRRWLDAGKPGDALPRSAHGDIIRHVRVCAGEFSSGVVLQRGSGQAQASNGGMVRTDIYSRDGKFYMVPVYAKDVADRRLPLRACVAAKAEKDWREMTADYRFLFSLTPDCYVLTENRKGEVKEGYFIGSDRSTAAISLSLAHDRQQSLRGIGITTLKRFEKYRVDRFGRLSPVRREADPRGRS

SEQ ID NO: 2581 - protein, 313 aa, unidentified
  REGION 1..313: note = Category: MG81 effectors
  REGION 1..313: note = Description: MG81-867 effector
  source 1..313: note = uncultivated organism sequence
MVANNEIKYYRVVRKWMKTKYKYYLQITFAGKPADKHREISTGRVGIDIGTQTIAIASDKSVKLLELADKVNKNHIKKCELQRKLDRSRRYTNPDNFNPDGTVRRGTKGHKLKWNKSKHYLEIAGKIRELERKNSDIRKYQHTCLANDILAMGNQIYIEPMNYKGLQKRAKETQVDEKGRYKKKKRFGKSLANKAPAMFVTILKTKAEQHGGEVYEVDIMSYRASQCDHTTGEYTKHGLNDRWRILGNGDKVQRDLYSAFLIKNSNKTHDEIDLDKCSKTYDSFKKLHDTEIENIRNEVMLRERKNISSYGIA

SEQ ID NO: 2582 - protein, 500 aa, unidentified
  REGION 1..500: note = Category: MG81 effectors
  REGION 1..500: note = Description: MG81-868 effector
  source 1..500: note = uncultivated organism sequence
MLTLPLLTEPWQEHIIEKRFKIIEHLKNQLISIELKKLKNLQRTKAYKNLIKQIESVPKSERTALYKERNKMLKDAGFSQYTFMDDMAGKKSLMQKHFESHINVQIAHKAAIDVWSSFEKFLFGTGQMIHYQKRGTLSSVASKSPKTGMFYYSDENIFKWSGGGTKPKGGIILCLRVASVKTNYEKEMVANNEIKYYRVVRKWMKTKYKYYLQITFAGKPADKHREISTGRVGIDIGTQTIAIASDKSVKLLELADKVNKNHIKKCELQRKLDRSRRYTNPDNFNPDGTVKRGTKGHKLKWNKSKHYLEIAGKIRELERKNADIRKYQHTCLANDILAMGNQIYIEPMNYKGLQKRAKETQVDEKGRYKKKKRFGKSLANKAPAMFVTILKTKVEQHGGEVYEVDIMSYRASQCDHTTGEYTKHGLNDRWRILGNGDKVQRDLYSAFLIKNSNKTHDEIDLDKCSKTYDSFKKLHDKEIENIRNEVKLRERRNISSYGIA

SEQ ID NO: 2583 - protein, 192 aa, unidentified
  REGION 1..192: note = Category: MG81 effectors
  REGION 1..192: note = Description: MG81-869 effector
  source 1..192: note = uncultivated organism sequence
MCLEYLILYPDSNEHIRKYQHTCLANDILAMGNQIYIEPMNYKGLQKRAKETQVDEKGRYKKKKRFGKSLANKAPAMFVTILKTKAEQHGGEVYEVDIMSYRASQCDHTTGEYTKHGLNDRWRILGNGDKVQRDLYSAFLIKNSNKTHDEIDLDKCSKTYDSFKKLHDKEIENIRNEVILRKRRNISSYGIA

SEQ ID NO: 2584 - protein, 1099 aa, unidentified
  REGION 1..1099: note = Category: MG81 effectors
  REGION 1..1099: note = Description: MG81-870 effector
  source 1..1099: note = uncultivated organism sequence
MQVRDDVILGLDIGVGSLGWALLEEDLQTGEQRLLQRQTPQGETTYALGVRLFHVPEKNAKTKELLNVKRRTARMQRRTTARRAQRMRRVRALLDSLGVPGVRDADAFHLGKGRGAQCDPWQLRREGLERRLEAREWAVVLLHIAKHRGFRSNSKTDRSGSDKEMGQVLQAVSNLQQEVEASGLTVGALLASRERRRNRADHTGAPRYDLCMLRSLQENEVDILFTRQRELGNPLAGEEVRCRYAELAFAQRPLAPVSHMVGPCAFLEGERRAPRFAPTAELFRYVQALCNMRLRQETGEETPLSEEQRQAACAVFGSVQSVTYKKLRQVLRLPAGCRFAGLSYGVTEKGNVQDPEKADVVMRTGKCCQGTACLRGILGDAYEALHEQRLDEADAARLAATGALSAPAAALLARGMAGLRLTDALVRIVSELNDLGQIRALLALLPLPAPRIAALSQAAGEGKLGFFQGTARLSLRAMEAILPHMLACGEYAAACELAGFDPRAAQKTDVTDIRNPVVLRVFREVRRQFSAICREFGFLPGRVHVELLREVGKSGEERNRISRGLERRTKEKEAARKAVAQLLGKSPETVSAGEVQRYELWRQQDGKCAYYMLWRHAGGERAYGDAMPQGSIPPDWLADGVNAVQVDHILPRSRTFDNSFHNLCLCCHAANQAKGGRTPWEWLGAAQPQAWHDFEQWVQSLPLKGLKKRNYLLRDLNAEVQGRFHARNLTDSGYVARLTLRWLEEEYARHDVPMQDADGRTRRRFFARPGQVTDFLRRHWGVQALKKIDGQRSGDRHHALDALLVAACSEGMLQRMVRAFQREENGPERLHIPCPWQDFSATVGRALGSVFVSRVERGRTKGPLHEETLRAIREERQPDGETRRVLYERKAVARLTAADLDKIKDAARCPDVVAALRRWLDAGKPGDALPRSAHGDIIRHVRVCAGEFSSGVILQRGSGQAQAKNGGIVRTDIYSRDGKFYMVPVYAKDVADKRLPLRACVAHKDEKDWLELTEDYHFLFSLTPDCYVLTENRKGEVKEGYFEGPDRGSANISLSLAHDKKNTIRGIGIQNLKRFEKYRVDRFGRLSLVRREADPRGRS

SEQ ID NO: 2585 - protein, 512 aa, unidentified
  REGION 1..512: note = Category: MG81 effectors
  REGION 1..512: note = Description: MG81-871 effector
  source 1..512: note = uncultivated organism sequence
MPTKQKEGGNRCVLTLPLLTEPWQEHIIEKRFKIIEHLKNQLISIELRKLKNLQRTKAYKNLIKQIESVPKSERTALYKERNKMLKDAGFSQYTFMDDMAGKKSLMQKHFESHINVQIAHKAAIDVWSAFEKFLFGSGQMIHYQKRGTLSSVASKSPKTGMFYYSDENIFKWSGGGTKPKGGIILCLRVASVKTNYEKEMVANNEIKYYRVVRKWMKTKYKYYLQITFAGKPADKHREISTGRVGIDIGTQTIAIASDKSVKLLELADKVNKNHIKKCELQRKLDRSRRYTNPDNFNPDGTVKRGTKGHKLKWNKSKHYLEVAGKIRELERKNADIRKYQHTCLANDILAMGNQIYIEPMNYKGLQKRAKETQVDEKGRYKKKKRFGKSLANKAPAMFVTILKTKAEQHGGEVYEVDIMSYRASQCDHTTGEYTKHGLNDRWRILGNGDKVQRDLYSAFLIKNSNKTHDEIDLDKCSKTYDSFKKLHDKEIENIRNEVKLRERRNISSYGIA

SEQ ID NO: 2586 - protein, 353 aa, unidentified
  REGION 1..353: note = Category: MG81 effectors
  REGION 1..353: note = Description: MG81-872 effector
  source 1..353: note = uncultivated organism sequence
MPTKQKEGGNRCVLTLPLLTEPWQEHIIEKRFKIIEHLKNQLISIELRKLKKLQRTKAYKNLIKQIESVPKSERTVLYKERNKMLKDAGFSQYTFMDDMAGKKSLMQKHFESHINVQIAHKAAIDVWSSFEKFLFGTGQIVHYQKRGTLSSVASKSPKTGMFYYSDENIFKWSGGGTKPKGGIILCLRVASVKTNYEKEMVANNEIKYYRVVRKWMKTKYKYYLQITFAGKPADKHREISTGRVGIDIGTQTIAIASDKSVKLLELADKVNKNHIKKCELQRKLDRSRRYTNPDNFNPDGTVKRGTKGHKLKWNKSKHYLEVAGKIRELERKNADKGVTVWVQILLKVNFANP

SEQ ID NO: 2587 - protein, 521 aa, unidentified
  REGION 1..521: note = Category: MG81 effectors
  REGION 1..521: note = Description: MG81-873 effector
  source 1..521: note = uncultivated organism sequence
MLILGRRMYMPTKQKEDSNRCVLTLPLLTEPWQEHIIEKRFKIIEHLKNQLISIELRKLKNLQRTKAYKNLIKQIESVPKSERTALYKERNKMLKDAGFSQYTFMDDMAGKKSLMQKHFESHINVQIAHKAAIDVWSSFEKFLFGTGQIVHYQKRGTLSSIASKSPKTGMFYYSDENIFKWSGGGTKPKGGIILCLRVASVKTNYEKEMVANNEIKYYRVVRKWMKTKYKYYLQITFAGKPADKHREISTGRVGIDIGTQTIAIASDKSVKLLELADKVNKNHIKKCELQRKLDRSRRYTNPDNFNSDGTVKRGTKGHKLKWNKSKHYIEIAGKIRELERKNADIRKYQHTCLANDILAMGNQIYIEPMNYKGLQKRAKETQVDEKGRYKKKKRFGKSLANKAPAMFVTILKTKAEQHGGEVYEVDIMSYRASQCDHTTGEYTKHGLNDRWRILGNGDKVQRDLYSAFLIKNSNKTHDEIDLDKCSKTYDNFKKLHDKEIENIRNEVKLRERKNISSYGIA

SEQ ID NO: 2588 - protein, 512 aa, unidentified
  REGION 1..512: note = Category: MG81 effectors
  REGION 1..512: note = Description: MG81-874 effector
  source 1..512: note = uncultivated organism sequence
MPTKQKEGGNRCVLTLPLLTEPWQEHIIEKRFKIIEHLKNQLISIELRKLKKLQRTKAYKNLIKQIESVPKSERTVLYKERNKMLKDAGFSQYTFMDDMAGKKSLMQKHFESHINVQIAHKAAIDVWSSFEKFLFGTGQIVHYQKRGTLSSVASKSPKTGMFYYSDENIFKWSGGGTKPKGGIILCLRVASVKTNYEKEMVANNEIKYYRVVRKWMKTKYKYYLQITFAGKPADKHREISTGRVGIDIGTQTIAIASDKSVKRLELADKVNKNHIKKCELQRKLDRSRRYTNPDNFNPDGTVKRGTKGHKLKWNKSKHYLEVAGKIRELERKNADIRKYQHTCLANDILAMGNQIYIEPMNYKGLQKRAKETQVDEKGRYKKKKRFGKSLANKAPAMFVTILKTKAEQHGGEVYEVDIMSYRASQCDHTTGEYTKHGLNDRWRILGNGDKVQRDLYSAFLIKNSNKTHDEIDLDKCSKTYDSFKKLHDKEIENIRNEVILRKRRNISSYGIA

SEQ ID NO: 2589 - protein, 583 aa, unidentified
  REGION 1..583: note = Category: MG81 effectors
  REGION 1..583: note = Description: MG81-875 effector
  source 1..583: note = uncultivated organism sequence
MVLRVFREVRRQFSAICREFGFLPGRVHVELLREVGKSGEERNRISRGLERRTKEKEAARKAVAQLLGKSPETVSAGEVQRYELWRQQDGKCAYYMLWRHAGGERAYGDAMPQGSIPPAWLADGVNAVQVDHILPRSRTFDNSFHNLCLCCHAANQAKGGRTPWEWLGAAQPQAWHDFEQWVQSLPLKGLKKRNYLLRDLNAEVQGRFHARNLTDSGYVARLTLRWLEEEYARHDVPMQDADGRTRWRFFARPGQVTDFLRRHWGVQALKKIDGQRSGDRHHALDALLVAACSEGMLQRMVRAFQREENGPERLHIPCPWQDFSATVGRALGSVFVSRVERGRTKGPLHEETLRAIREERQPDGETRRVLYERKAAARLTAADLDKIKDAARCPDVVAALRRWLNAGKPGDALPRSAHGDIIRHVRVCAGEFSSGVVLQRGSGQAQASNGGMVRTDIYSRDGKFYMVPVYAKDVADKRLPLRACVAAKAEKDWREMTADYRFLFSLTPDCYVLTENRKGEVKEGYFAGANRNTSAISLSLAHDKQNVIQGIGITTLKRFEKYRVDRFGRLSLVRREADPRGRS

SEQ ID NO: 2590 - protein, 512 aa, unidentified
  REGION 1..512: note = Category: MG81 effectors
  REGION 1..512: note = Description: MG81-876 effector
  source 1..512: note = uncultivated organism sequence
MPTKQKEGGNRCVLTLPLLTEPWQEHIIEKRFKIIEHLKNQLISIELRKLKNLQRTKAYKNLIKQIESVPKSERTALYKERNKMLKDAGFSQYTFMDDMAGKKSLMQKHFESHINVQIAHKAAIDVWSSFEKFLFGTGQIVHYQKRGTLSSVASKSPKTGMFYYPDENIFKWSGGGTKPKGGIILCLRVASVKTNYEKEMVANNEIKYYRVVRKWMKTKYKYYLQITFAGKPADKHREISTGRVGIDIGTQTIAIASDKSVKLLELADKVNKNHVKKCELQRKLDRSRRYTNPDNFNPDGTVKRGTKGHKLKWNKSKHYIEIAGKIRELERKNTDIRKYQHTCLANDILAMGNQIYIEPMNYKGLQKRAKETQVDEKGRYKKKKRFGKSLANKAPAMFVTILKTKAEQHGGEVYEVDIMSYRASQCDHTTGEYTKHGLNDRWRILGNGDKVQRDLYSAFLIKNSNKTHDEIDLDKCSKTYDNFKKLHDKEIENIRNEVILRKRRNISSYGIA

SEQ ID NO: 2591 - protein, 540 aa, unidentified
  REGION 1..540: note = Category: MG81 effectors
  REGION 1..540: note = Description: MG81-877 effector
  source 1..540: note = uncultivated organism sequence
MATTDKKDEENLRAYKFRLDPNQAQTTALYQAVGAARYTYNMLTAYNLEVNRLRDDYWKRRHDEDISDADIKKELNALAKEDKRYKQLNYGAFGTQYLTPEKKRHEQAEHRIENGEDPSVVWNQETERSANPWLHTANQRVLVSGLQNASDAWDNFWASRTGKRAGRLVGTPRFKKKGVSRDSFTVPAPEKMGAYGTAYLRGEPAYKQGRRKITDYRHVRLSYLGTIRTFNSTKPLVKAVVAGAKIRSYTVSRNADRWYVSFLVKFSEPIRRSATKRARAAGSVGVDLGVKYLASLSDSEAPQRFPNLKFVEGLPSLENPRWSEASSRRLHKLQRALARSQKGSNRRSRLVKQIARLHHMTALRRESNLQQLTKKLATGYTLVGFEDLNVSGMTASAKGTVENPGKNVAQKSGLNRVVLDAAFGVFRNQLEYKAVWYGSAFEKVNRYFASSQTCSECGRKAKTKLTLRDRVFDCAYCGNMMDRDLNAAVNICREAQRLFDEKLASEDRESLNGRGSRGALRGAETVEASRPPASHRRGSP

SEQ ID NO: 2592 - protein, 1098 aa, unidentified
  REGION 1..1098: note = Category: MG81 effectors
  REGION 1..1098: note = Description: MG81-878 effector
  source 1..1098: note = uncultivated organism sequence
MQVHDDVILGLDIGVGSLGWALLEEDLQTGEQRLLQRQTPQGETTYALGVRLFHVPENAKTKELLNVKRRTARMQRRTTARRAQRMRRVRALLDSLGVPGVRDADAFHLGKGRGAQCDPWQLRREGLERRLEAREWAVVLLHIAKHRGFRSNSKTDRSGSDKEMGQVLQAVSNLQQEVEASGLTVGALLASRERRRNRADHTGAPRYDLCMLRSLQENEVDILFTRQRELDNPLAGEEVRCRYAELAFAQRPLAPVSHMVGPCAFLEGERRAPRFAPTAELFRYVQALCNMRLRQETGEETPLSEEQRQAACAVFGSVQSVTYKKLRQVLRLPAGCRFAGLSYGVTEKGNVQDPEKADVVMRTGKCCQGTACLRGILGDAYEALHEQRLDEADAARLAATGALSAPAAALLARGMAGLRLTDAVARIVSELNDLDQIRAVLALLPLAAPRIAALSQAAGEGKLGIFQGSARLSLRAMEAILPHMLACGEYAAACELAGFDPRAAQKTDVTDIRNPVVLRVFREVRRQFSAICREFGFLPGRVHVELLREVGKSGEERNRISRGLERRTKEKEAARKAVAQLLGKSPETVSAGEVQRYELWRQQDGKCAYYMLWRHAGGERAYGDAMPQGSIPPDWLADGVNAVQVDHILPRSRTFDNSFHNLCLCCHAANQAKGGRTPWEWLGAAQPQAWHDFEQWVQSLPLKGLKKRNYLLRDLNAEVQGRFHARNLTDSGYVARLTLRWLEEEYARHDVPMQDADGRTRRRFFARPGQVTDFLRRHWGVQALKKIDGQRSGDRHHALDALLVAACSEGMLQRMVRAFQREENGPERLHIPCPWQDFSATVGRALGSVFVSRVERGRTKGPLHEETLRAIREERQPDGETRRVLYERKAVARLTAADLDKIKDAARCPDVVAALRRWLDAGKPGDALPRSAHGDIIRHVRVCAGEFSSGVVLQRGSGQAQASNGGMVRTDIYSRDGKFYMVPVYAKDVADKRLPLRACVAAKAEKDWREMTADYRFLFSLTPDCYVLTENRKGEVKEGYFAGANRNTSAISLSLAHDKQNVIQGIGITTLKRFEKYRVDRFGRLSLVRREADPRGRS

SEQ ID NO: 2593 - protein, 1268 aa, unidentified
  REGION 1..1268: note = Category: MG81 effectors
  REGION 1..1268: note = Description: MG81-879 effector
  source 1..1268: note = uncultivated organism sequence
MKVSKVNHRRAAVAVNKKSVTVNGILYDAPVKKNVKTGNMSAYVSSKYVIDNVVKNSSRLYSPFSSKRIVIDREKIRIADRLKQCYVNFVKYYLSNGSLNEQQMRFNPNNTYMADSRVHFCVPSGIDKESLIDSIVDSSLRKSLKRTYRFETNYGEKITFNLPDLVKKSIKIYCTDEKRKLNDREEQEMYVLFSYMYEDKYKDRQKVLIANSISNQATKVKVCDDESSLIKLSIADTKKKPLWDFIVDYANSDKNGQYTILRNIRKSIVLFVCGVDVYRNIENNDNLDIWKWEEYGIQESQLFVKIENCYTTKDEDIALNEIRNVNLDHYMKAIGVLDDERSKFWFQHYENTIEALFSKKSKRKIERIKTAYLCEYLWKNFCSYVALKYIDLGKGVYHFTMSDKLSLMNKNTNENGIKFGEVDSRFNKGISSFDYERIKAEETIDRNISTYTTFATNIFAKSVIKDSYIQKKAGNSDALQYDDETYYNRKAMNPDALKRVLQYWGGQSRWKSELEELNVAELCIDIKNRLSKIRNSGVHYTSTSTLKGNDDDSIVGMLIKKDFDDIKDVYASKYYSNNVWIFYNTDKISKMMEYLYQDDSNIRDAQIPAFNSVIKRKDMAEVIEKIIKKNSYKTIKEPYQREKYRSCLYFMLKEIYYNRFIKQDDLKDQVIQIIDSNTELIGDNSRAVDNLKKRIHDVDSQTMSFGELCQVIMTDYNMQNQENKSIKSKERQDKDRKNGIDNSYKHFPLLLHHLIKVSFLKFIKTDEKLAFIREPRITEYDKTLEQFEAQIQTVDIYNSLKMMVAENKSLLDWYTLAHFLMPKQLNHLIGDIKNYIQYLSNIDKRAGSVKNNKSASTEVKIRQYSEIVRILDFSLQYIGRASNDVTDYFVDEDEYAAFLSKYVEFSGNNTVSMKAFCQSRTANGKHTIGLYFDGANPIMNRNIVYAKMYGNDEILSYIYNKVTKKDIEKYYVSQDNLEKVFADGKCQDVQQQNALCDFQKMKNHIELTEVSIYTDILNDFMAQFISWAYFRERDLMYFQLGLNYIRIFYGTYELEEKYNKLHGENINIEKGALLYQIVAMYSHELPIYKVDESDIAILAEKQGSSGASIKSFVTEYCKEEMKKAYTYENGLELFEDVNRHDNLSKLRNDFAHMRYMSARDKSIMDIVSEIYNGFFIYDTKLKKSVSFIFKNILMRYAVDVNIEFCHKGDNEDTNNLIRIKDEVGLYSDKYTYKVEDNDTVDIEVRNSEFLEQLKKLLEYKKESKGSEL

SEQ ID NO: 2594 - protein, 512 aa, unidentified
  REGION 1..512: note = Category: MG81 effectors
  REGION 1..512: note = Description: MG81-880 effector
  source 1..512: note = uncultivated organism sequence
MPTKQKEGGNRCVLTLPLLTEPWQEHIIEKRFKIIEHLKNQLISIELRKLKKLQRTKAYKNLIKQIESVPKSERTVLYKERNKMLKDAGFSQYTFMDDMAGKKSLMQKHFESHINVQIAHKAAIDVWSSFEKFLFGTGQIVHYQKRGTLSSVASKSPKTGMFYYSDENIFKWSGGGTKPKGGIILCLRVASVKTNYEKEMVANNEIKYYRVVRKWMKTKYKYYLQITFAGKPADKHREISTGRVGIDIGTQTIAIASDKSVKLLELADKVNKNHIKKCELQRKLDRSRRYTNPDNFNPDGTVKRGTKGHKLKWNKSKHYLEVAGKIRELERKNADIRKYQHTCLANNILAMGNQIYIEPMNYKGLQKRAKETQVDEKGRYKKKKRFGKSLANKAPAMFVTILKTKAEQHGGEVYEVDIMSYRASQCDHTTGEYTKHGLNDRWRILGNGDKVQRDLYSAFLIKNSNKTHDEIDLDKCSKTYDSFKKLHDKEIENIRNEVILRKRRNISSYGIA

SEQ ID NO: 2595 - protein, 512 aa, unidentified
  REGION 1..512: note = Category: MG81 effectors
  REGION 1..512: note = Description: MG81-881 effector
  source 1..512: note = uncultivated organism sequence
MPTKQKEGGNRCVLTLPLLTEPWQEHIIEKRFKIIEHLKNQLISIELRKLKNLQRTKAYKNLMKRIESVPKSERTALYKERNKMLKDAGFSQYTFMDDMAGKKRLMQKHFESHINVQIAHKAAIDVWSSFEKFLFGTGQIVHYQKRGTLSSVASKSPKTGMFYYSDENIFKWSGGGTKPKGGIILCLRVASVKTNYEKEMVANNEIKYYRVVRKWMKTKYKYYLQITFAGKPADKHREISTGRVGIDIGTQTIAIASDKSVKLLELADKVNKNHIKKCELQRKLDRSRRYTNPDNFNPDGTVKRGTKGHKLKWNKSKHYLEVAGKIRELERKNADIRKYQHTCLANDILAMGNQIYIEPMNYKGLQKRAKETQVDEKGRYKKKKRFGKSLANKAPAMFVTILKTKAEQHGGEVYEVDIMLYRASQCDHTTGEYTKHGLNDRWRILGNGDKVQRDLYSAFLIKNSNKTHDEIDLDKCSKTYDNFKKLHDKEIENIRNEVKLRERRNISSYGIA

SEQ ID NO: 2596 - protein, 482 aa, unidentified
  REGION 1..482: note = Category: MG81 effectors
  REGION 1..482: note = Description: MG81-885 effector
  source 1..482: note = uncultivated organism sequence
MPTKQKEGGNRCVLTLPLLTEPWQEHIIEKRFKIIEHLKNQLISIELRKLKNLQRTKAYKNLMKRIESVPKSERTALYKERNKMLKDAGFSQYTFMDDMAGKKSLMQKHFESHINVQIAHKAAIDVWSSFEKFLFGSGQMIHYQKRGTLSSVASKSPKTGMFYYSDENIFKWSGGGTKPKGGIILCLRVASVKTNYEKEMVANNEIKYYRVVRKWMKTKYKYYLQITFAGKPADKHREISTGRVGIDIGTQTIAIASDKSVKLLELADKVNKNHIKKCELQRKLDRSRRYTNPDNFNPDGTVKRGTKGHKLKWNKSKHYLEIAGKIRELERKNADIRKYQHTCLANDILAMGNQIYIEPMNYKGLQKRAKETQVDEKGRYKKKKRFGKSLANKAPAMFVTILKTKAEQHGGEVYEVDIMSYRASQCDHTTGEYTKHGLNDRWRILGNGDKVQRDLYSAFLIKNSNKTHDEICLLYTSDAAAN

SEQ ID NO: 2597 - protein, 1134 aa, unidentified
  REGION 1..1134: note = Category: MG81 effectors
  REGION 1..1134: note = Description: MG81-886 effector
  source 1..1134: note = uncultivated organism sequence
MKYVIGMDIGIGSIGWSVIRSDADCKRIEDFGVRIFEPGENASDRKSNSQIRREYRSVRRVLRRRKHRKELLKAHLENIGLTTIDRINEYFKHADGDIISLRVKGLDKKLAPEEIAACLINIANRRGYRPFYENEELSQYEKTSLNKTRQFMLSGEYRTSAEMILKNEQFDSEESEYRSYRNRSGNEETVLIERKWLRDEVEKILKKQSEFYPCLNDRNTNAIKRIIFDQRDFEDGPGDKNDPFRRYTGFLESMGQCRFYPDEKRGYRATLTADTYSLVNELSQYSYVDENGCFVFDSALAHDLIASALKNAKLTKSDFNKICKAHGIVPIYGGKGKDTDISRCFKFLKAIKPILEADGFDWETVCNIDTASDPDSILNRIGIIVSENITPARRKKALKNLNILNDDSITALCNYKFGGTSSVSYKYMSGAIEAFLNGDIYGKHQASHIEETATESVKHTKLPVFDKDFEFFKNPVVFRAINESRKVINAIIEKYGSPSAINIEVGSEVSRSFANRTADKNEQTKRMKEKDAAKKAIAELLGVDIASVTSKMIDRYFLGELQGWKCMYSGKEINKEECLRGSKAYEIDHIVPFSLILDNTLNNKALVLTSENQLKKQQTPLMYLSGERRKNFIGTVNELFRAKKIKKKKYAYLLQPDLNDEKMSEWKSRNLNDMRHISRFMVGYLKENLKFDNSSKSEGRWQNVYAVKGSLTSMFRKLWLNETTWGRADKASIKAETYLDHAVDAVVIGNCLPVYVEIAQVNLRLRDIYKSNGRQFVAEYWDCFNKGVEMISRYYNIDKDTVRAFLKKSDRIPSLIPDLREEVDRRFVDHAIYSKYQKEIADHEGKKFKEPTYEEAEQAYRVSMENLYPTDLQFAHGLSMPLISCKPERKYRGEITAANPVKLREIDGKLYTLSKKEIGKIERKDIEKIYTSDANLIAYLIELFDGAKDTATLGDIMKEKGISEIRTKNGNAIRKLTLRNICNKDFLKKEIDENNHTYLDTAKYYCVELYKDIKNQLQVQGIKRADIILQNGKLCLAPWYKQPDDYFKHVMYLQKNDYLKVYKNGKLSFCGYYRSAAGLTNSRLYFIIDNQPEDKKKYITLKLEVKKYPVDILGKIGKKEIKCGEPLSSAKVKK

SEQ ID NO: 2598 - protein, 1134 aa, unidentified
  REGION 1..1134: note = Category: MG81 effectors
  REGION 1..1134: note = Description: MG81-887 effector
  source 1..1134: note = uncultivated organism sequence
MKYVIGMDIGIGSIGWSVIRSDADCKRIEDFGVRIFDPGENASDRKSNSQIRREYRSVRRVLRRRKHRKELLKAHLENIGLTTIDRINEYFKHADGDIISLRVKGLDKKLAPEEIAACLINIANRRGYRPFYENEELSQYEKTSLNKTRQFMLSGEYRTSAEMILKNEQFDSEESEYRSYRNRSGNEETVLIERKWLRDEVEKILKKQSEFYPCLNDRNTNAIKRIIFDQRDFEDGPGDKNGPFRRYTGFLESMGQCRFYPDEKRGYRATLTADTYSLVNELSQYSYVDENGCFVFDSALAHDLIASALKNAKFTKSDFNKICKAHGIVSIYGGKGKDTDISRCFKFLKAIKPILEADGFDWETVCNIDTASDPDSILNRIGIIVSENITPARRKKALKNLNILNDDSITALCNYKFGGTSSVSYKYMSGAIEAFLNGDIYGKHQASHIEETATESVKHTKLPVFDKDFEFFKNPVVFRAINESRKVINAIIEKYGSPSAINIEVGSEVSRSFANRTADKNEQTKRMKEKDAAKKAIAELLGVDIASVTSKMIDRYFLGELQGWKCLYSGKEINKEECLRGSKAYEIDHIVPFSLILDNTLNNKALVLTSENQSKKQQTPLMYLSGERRKNFIGTVNELFRAKKIKKKKYAYLLQPDLNDEKMSEWKSRNLNDMRHISRFMVGYLKENLKFDNSSKSEGRWQNVYAVKGSLTSMFRKLWLNETTWGRADKASIKAETYLDHAVDAVVIGNCLPVYVEIAQVNLRLRDIYKSNGRQFVAEYWDCFNKGVEMISRYYNIDKDTVRAFLKKSDRIPSLIPDLREEVDRRFVDHAIYSKYQKEIADHEGKKFKEPTYEEAEQAYRVSMENLYPTDLQFAHGLSMPLISCKPERKYRGEITAANPVKLREIDGKLYTLSRKEIGKIERKDIEKIYTSDTQLIAYLIELFDGAKDTATLGDIMKEKSISEIRTKNGNAIRKLTLRNICNKDFLKKEIDENNHTYLDTAKYYCVELYKDIKNQLQVQGIKRADIILQNGKLCLAPWYKQPDDYFKHVMYLQKNDYLKVYKNGKLSFCGYYRSAAGLTNSRLYFIIDNQPEDKKKYITLKLEVKKYSVDILGKIGKKEIKCGEPLSSAKVKK

SEQ ID NO: 2599 - protein, 558 aa, unidentified
  REGION 1..558: note = Category: MG81 effectors
  REGION 1..558: note = Description: MG81-888 effector
  source 1..558: note = uncultivated organism sequence
MVKKTSTDADTTLRAYKFRLDPTQAQKIALAQCAGAARYAYNLLTAHNLEVSRTRADYWHTRIDAGADETTVKADLKALAKSDVAYKSIGYAAYGTQYLTPEINRHRAASNAITDGADPTAVWPETERSSEPWMHTIPRRVLVSGLQSADKAWKNFFDSRTGARAGRLVGTPRFKRKGSSRDSFTVHHETTGAYGTYYHKKDPEYARRKAQLKRRGINAKPTITDYRHVRLSHLGVIRTHNTTKPLVKAVRAGAQIRSYTVSRAANRWYVSILVELTRPSATPTHAQRSAGAVGVDLGVRYLAVLSDEQAPQRFARYPSLEFTGDGAPTLANPRWARAAEKRLVRLQRALARAQKGSKRRARLVQQIARHHHLVALRRESGLHQVSKRLTTGYTLIGLEDLAVAGMTASAAGTVEAPGKNVRQKAGLNRSILDAAFSTLRRQLEYKSSWYGSQVQIIDRFFASSQTCSACGARTKTKLDLRVRVFECAACGVRIDRDVNAARNIRAEAVRMYEAQLAPGTGESLNGRGATDSDAAGSVALGDVALDAPRPAASGGGSP

SEQ ID NO: 2600 - protein, 567 aa, unidentified
  REGION 1..567: note = Category: MG81 effectors
  REGION 1..567: note = Description: MG81-889 effector
  source 1..567: note = uncultivated organism sequence
MAKRKKHQITEYEKCLREYHKASPRHVIVLETDLLEDEKRHLFHQADLLRQCGNELLGIMKRHLDQLLRTKKYRGLRKSYGKISKSIKNLQQIKKLSNVQKQHLKDLQKDLRTISNLMNEMQKSYHVTWEYCRNTMKTLRLKYEQTSVIALSRAEDIWTAVSKVLYSDGERLHFKKRGDLSELRAKQFHKEIIGRVKNGFLEFRYGKVSLPVIRKETDLWLMNELEAVESYLKDPDFHDAYAINQMQQGEIVSTYRPCYASIVCKTIRGKLRVYLHLTVEGLPFSKRTNDGIIKHPYGNGPVGCDIGTQTIAYTSDHTVGLENLAERGNSICYVERWQRLVQRAMDRSRRAMNPDNYNDDGTIRKGKKTWIKSKRYQKLQLRYRELCRISAENRRLAIHEQVHKMRSLGDIFVTEAKNAKKLQKRANPENPLDKNGRPKRKKRFGRSIQNRCPGYFQAKVKQLFESTGGTYIEVPSDYRASQYDHTVDDYIKKKLSQRMYNLKDGTKVQRDWYSSFLLYCIDLITKTIDRQKCLATFETQLNKEHAMIEEIIHLKKHIMNSGIRVAV

SEQ ID NO: 2601 - protein, 1134 aa, unidentified
  REGION 1..1134: note = Category: MG81 effectors
  REGION 1..1134: note = Description: MG81-890 effector
  source 1..1134: note = uncultivated organism sequence
MKYVIGMDIGIGSIGWSVIRSDADCKRIEDFGVRIFDPGENASDRKSNSQIRREYRSVRRVLRRRKHRKELLKAHLENIGLTTIDRINEYFKHADGDIISLRVKGLDKKLAPEEIAACLINIANRRGYRPFYENEELSQYEKTSLNKTRQFMLSGEYRTSAEMILKNEQFDSEESEYRSYRNRSGNEETVLIERKWLRDEVEKILKKQSEFYPCLNDRNTNAIKRIIFDQRDFEDGPGDKNDPFRRYTGFLESMGQCRFYPDEKRGYRATLTADTYSLVNELSQYSYVDENGCFVFDSALAHDLIASALKNAKFTKSDFNKICKAHGIVPIYGGKGKDTDISRCFKFLKAIKPILEADGFDWETVCNIDTASDPDSILNRIGIIVSENITPARRKKALKNLNILNDDSITALCNYKFGGTSSVSYKYMSGAIEAFLNGDIYGKHQASHIEETATESIKHTKLPVFDKDFEFFKNPVVFRAINESRKVINAIIEKYGSPSAINIEVGSEVSRSFANRTADKNEQTKRMKEKDAAKKAIAELLGVDIASVTSKMIDRYFLGELQGWKCLYSGKEINKEECLRGSKAYEIDHIVPFSLILDNTLNNKALVLTSENQLKKQQTPLMYLSGEQRKNFIGTVNELFRAKKIKKKKYAYLLQPDLNDEKMSEWKSRNLNDMRYISRFMVGYLKENLKFDNSSKSEGRWQNVYAVKGSLTSMFRKLWLNETTWGRADKASIKAETYLDHAVDAVVIGNCLPVYVEIAQVNLRLRDIYKSNGRQFVAEYWDCFNKGVEMISRYYNIDKDTVRAFLKKSDRIPSLIPDLREEVDRRFVDHAIYSKYQKEVADHEGKDFKKPTYEEAEQAYRVSMENLYPTDLQFAHGLSMPLISCKPERKYRGEITAANPVKLREIDGKLYTLSKKEIGKIERKDIEKIYTSDANLIAYLIELFDGAKDTATLGDIMKEKGISEIRTKNGNAIRKLTLRNICNKDFLKKEIDENNHTYLDTAKYYCVELYKDIKNQLQVQGIKRADIILQNGKLCLAPWYKQPDDYFKHVMYLQKNDYLKVYKNGKLSFCGYYRSAAGLTNSRLYFIIDNQPEDKKKYITLKLEVKKYPVDILGKIGKKEIKCGEPLSSAKVKK

SEQ ID NO: 2602 - protein, 359 aa, unidentified
  REGION 1..359: note = Category: MG81 effectors
  REGION 1..359: note = Description: MG81-891 effector
  source 1..359: note = uncultivated organism sequence
MRGYSVTGKSGGVEIIFRETYIEWKGLKLPLKRSPDNAYETEMLSRRVKYVRLLRKPGKRKDRWYAQLSLEGKPAIKHDPESGELRHAIGRGAVGLDIGPQTLAYSACGAADLVELADQVQNIEQMKRRLQRKLDRSRRATNPDNYADNGTIRRGVKLTHNKSNRYRRTQRELRYLQHCQAEIRKRQHIELANHLLALGDCFYVEDMAWPSLTHRAKETAISEKTGRIKRKKRFGKSVANKAPATLIGILEQKCNSLGLPGVMKVPTSLRASQYNHQSGEYTSKPLSQRWNDMPDGERIQRDLYSAFLLQHYDPQAGNFNSALLQQDYPQFVQYHHRAIQRLSTAPKTLSSMGIQRSLR

SEQ ID NO: 2603 - protein, 495 aa, unidentified
  REGION 1..495: note = Category: MG81 effectors
  REGION 1..495: note = Description: MG81-892 effector
  source 1..495: note = uncultivated organism sequence
MPKEEKESCCVLQLRLYPEPWQVQIIETRFKVLEHLKNSLIALELRKLRNLERTRAYREIQEQIKLADDKSKIKLYAKRRKLLKDAGFSEFVFKDDITPMQKHFAAHIATHVAHRAASEVWRAFDKFLFGNGKMVHYVRRGTLRSASNQTAGTTMTLENGYFKWNGGRDQNSIAINIRVAKPTTYYEKEMLQKKAKYFRIVRKWGKIGYKYYLQITLAGLPAVKPRLIANEKKVGIDIGPSSIAIVSDKKVELRALADKVQNNHIEKCSLQRSMDRSRRNLNPQNYNEDGTIRRGIRLNWTFSKHYIEMRGKVRMLERKNVDIRKYQHTCLANEVILLGTDVYIEQMSFKGLQRRAKETTYREDGRPKRKKRFGKSIANRAPAMFVEILGRKLTTIVGTELNKVDTFKFRASQYDHTNGSYKKKLLKERWAQLSNGDRIQRDLYSAFLLKNSNADLNSTNVEQCNATYDAFKIMHDDCITKLKSEKKSCLPSFGV

SEQ ID NO: 2604 - protein, 521 aa, unidentified
  REGION 1..521: note = Category: MG81 effectors
  REGION 1..521: note = Description: MG81-893 effector
  source 1..521: note = uncultivated organism sequence
MMVTWKGGIPVGKSSTDTCCLTLPLKLEKWQEDRLAKRFEIARQIYNTMVRAELKKLDRVKQLPEYRKNQKEIQALDGKNSADRARLKELRANQNRILQKQGFTKYGFKSDSKDYYKHFIENIGSSVATHCIAPQVWNAFDKMLFQKDGKVVHFKRYGDVHSLKGGSVTNKSGGAEIMFRKTYIEWKGLKLPLKLSPNNAYEAEMLSYRVKYVRILRTRGKTKDRWYAQLSLEGKPAVKYDSSTGKPVHPVGRGAVGLDIGPQTLAYAAANEANLVELADQVQNIEQEKRRLQRKLDRSRRATNPDNYNENGTIRRGVKLTHNKSKRYCKLQKELSWIQHCQAETRKRQHIALANHLLSLGDCFYVEPMAWPSLTHRAKKTEVSEETGRIKRKKRFGKSVANKAPASLIGILRLKCISLGLTGVVEVPMLLRASQYNHQSKDYAKKSLSQRWNDMPDGNRIQRDLYSAFLLQHYNSQSESFDQETLERDYPQFVRLHNQTIQRLSALPKTPSSMGIRRSVS

SEQ ID NO: 2605 - protein, 541 aa, unidentified
  REGION 1..541: note = Category: MG81 effectors
  REGION 1..541: note = Description: MG81-894 effector
  source 1..541: note = uncultivated organism sequence
MVQSTADAEAKSVMYRAYKFRLDPNNEQVKALYQAAGAARYTYNMMTAYNLEIKKNRDEFWYAHITEDSDEQYKKQVESQLKALEKAEPARYKPLCQYASFSTQKLTPAKHKHKEVSEAIAQGVLPNDAWGSEEHPKNPWLHEANQRVLVSGLQNSAKAWKNFWDSQTGRRKGAKVNLPRLKKRGISRDSFTVPAPEAMGGYGAPYKNDSEQYKRLKKKGKDAVIQDYRHVRLSYLGVLRTFNSTKPLAKAVNTGAKIKSYTVSRNADRWYVSFLVELSEPIARPATKKQRAAGGVGIDLGVKTLVTLSDESNPYIANLRPGQRAQRKLKKLQQKFARSQKGSNRRARLAAEIARLHHKVALRRKGYLDQVTKGLVTQYSAVACEDLNVSGMVHSAKGTVENPGKNVAAKSGLNRSILDASFGMFIRQLEYKSAWYGSVVLKVDKWFPSSRTCFNCGEVKSKLPLSERVYDCQYCGYSADRDLNAARNILEQAYKEKEDKQNPQFAPERGENSNGRGRGSTCSVESGETSRPADGSAGHRR

SEQ ID NO: 2606 - protein, 519 aa, unidentified
  REGION 1..519: note = Category: MG81 effectors
  REGION 1..519: note = Description: MG81-895 effector
  source 1..519: note = uncultivated organism sequence
MIQPELKAYRRCSDRHVLVLETNLTYVEKCQIFHYADLVRKAGNELTGIMKKRYDQLVRTKRYRKLKSLYKKYKDADNKKALKDICDQMKEMQKQYDVTWDYCRTSMIPIGKKYGIDAVFALTKAENVFRGIEKCLYSDGETIHFKKRGDLPCIRAKQINRGIIMKQMNFKFKDIEFGVKIKDRYEQEEVNAILYYLKHAEFMDFIAANTYKETNICISTYRPCYVSLVCKKIRGKLRVYVHITIEGLSKPKQDRFGNFKHNKGKGIVGCDIGTQTIAYTTETKAGLKNLAERGSCIEVNERKERRIYRAMDRSRRAMNPDNYNEDGTIKKGKKKWTYSNRYKKLRTKHTELCRINATNRHLAINEDVNELRSLGDVFVTEPKNAKKLQKKAKTGKRKKRFGRSIKNRCPGYFQSQAKRKFRIYVEVPNDYKASQYDHTSDEYIKKSLSQRMYKLSDGTMVQRDLYSSFLLYCIDLNTNRIDKNKCIHEFKKQYKNQNETIEYIQMNQIKVMNSGIRVN

SEQ ID NO: 2607 - protein, 587 aa, unidentified
  REGION 1..587: note = Category: MG81 effectors
  REGION 1..587: note = Description: MG81-896 effector
  source 1..587: note = uncultivated organism sequence
MRKGNKPTDGLLWYPRRAVFDTSHQKRPCALRGGNGGHDAGWARSRWRTALTTGTGACYAPVSGGERTDSPTEVGRHPDAFEVTLPRLFAFGFGCGGFVLREAFMADHRKIYNTMVRAELKKLDRVKQLPEYRKNQKEIQALDWKNSADKQRLKELYGNQRKILQKQGFTEYGFKSDSKDYYKHFIENIGSSVATHGIAPQVWNAFDKMLFQKDGKVVHFKRYGDVHSLKGGSVAHKSGGAEIMFRKTYIEWKGLKLPLKLSPNNAYEAEMLSYRVKYVRILRTRGKTKDRWYAQLSLEGKPAVKYDSNTGKPVHPVGRGAVGLDIGPQTLAYAAANEENLVELADQVQNIEQEKRRLQRKLDRSRRATNPDNYNENGTIRRGVKLTHNKSKRYCKLQKELSWIQHCQAETRKRQHIALANHLLSLGDCFYVEPMAWPSLTHRAKKTEVSEKTGRIKRKKRFGKSVANKAPASLIGILKLKCISLGLTGVVEVPMLLRASQYNHQSKDYAKKSLSQRWNDMPDGNRIQRDLYSAFLLQHYNSQSESFDQETLERDYPQFVRLHNQTIQRLSALPKTPSSMGIRRSVS

SEQ ID NO: 2608 - protein, 1134 aa, unidentified
  REGION 1..1134: note = Category: MG81 effectors
  REGION 1..1134: note = Description: MG81-897 effector
  source 1..1134: note = uncultivated organism sequence
MKYVIGMDIGIGSIGWSVIRSDADCKRIEDFGVRIFEPGENASDRKSNSQIRREYRSVRRVLRRRKHRKELLKAHLENIGLTTIDRINEYFKHADGDIISLRVKGLDKKLAPEEIAACLINIANRRGYRPFYENEELSQYEKTSLNKTRQFMLSGEYRTSAEMILKNEQFDSEESEYRSYRNRSGNEETVLIERKWLRDEVEKILKKQSEFYPCLNDRNTNAIKRIIFDQRDFEDGPGDKNDPFRRYTGFLESMGQCRFYPDEKRGYRATLTADTYSLVNELSQYSYVDENGCFVFDSALAHDLIASALKNAKFTKSDFNKICKAHGIVPIYGGKGKDTDISRCFKFLKAIKPILEADGFDWETVCNIDTASDPDSILNRIGIIVSENITPARRKKALKNLNILNDDSITALCNYKFGGTSSVSYKYMSGAIEAFLNGDIYGKHQASHIEETATESVKHTKLPVFDKDFEFFKNPVVFRAINESRKVINAIIEKYGSPSAINIEVGSEVSRSFANRTADKNEQTKRMKEKDAAKKAIAELLGVDIASVTSKMIDRYFLGELQGWKCLYSGKEINKEECLRGSKAYEIDHIVPFSLILDNTLNNKALVLTSENQLKKQQTPLMYLSGERRKNFIGTVNELFRAKKIKKKKYAYLLQPDLNDEKMSEWKSRNLNDMRYISRFMVGYLKENLKFDNSSKSEGRWQNVYAVKGSLTSMFRKLWLNETTWGRADKASIKAETYLDHAVDAVVIGNCLPVYVEIAQVNLRLRDIYKSNGRQFVAEYWDCFNKGVEMISRYYNIDKDTVRAFLKKSDRIPSLIPDLREEVDRRFVDHAIYSKYQKEIADHEGKKFKEPTYEEAEQAYRVSMENLYPTDLQFAHSLSMPLISCKPERKYRGEITAANPVKLREIDGKLYTLSKKEIGKIERKDIEKIYTSDTQLIAYLIELFDGAKDTATLGDIMKEKGISEIRTKNGNAIRKLTLRNICNKDFLKKEIDENNHTYLDTAKYYCVELYKDIKNQLQVQGIKRADIILQNGKLCLAPWYKQPDDYFKHVMYLQKNDYLKVYKNGKLSFCGYYRSAAGLTNSRLYFIIDNQPEDKKKYITLKLEVKKYPVDILGKIGKKEIKCGEPLSSAKVKK

SEQ ID NO: 2609 - protein, 1138 aa, unidentified
  REGION 1..1138: note = Category: MG81 effectors
  REGION 1..1138: note = Description: MG81-898 effector
  source 1..1138: note = uncultivated organism sequence
MKYVIGMDIGIGSIGWSVIRSDADCKRIEDFGVRIFEPGENASDRKSNSQIRREYRSVRRVLRRRKHRKELLKAHLENIGLTTIDRINEYFKHADGDIISLRVKGLDKKLAPEEIAACLINIANRRGYRPFYENEELSQYEKTSLNKTRQFMLSGEYRTSAEMILKNEQFDSEESEYRSYRNRSGNEETVLIERKWLRDEVEKILKKQSEFYPCLNDRNTNAIKRIIFDQRDFEDGPGDKNDPFRRYTGFLESMGQCRFYPDEKRGYRATLTADTYSLVNELSQYSYVDENGCFVFDSALAHDLIASALKNAKFTKSDFNKICKAHGIVPIYGGKGKDTDISRCFKFLKAIKPILEADGFDWETVCNIDTASDPDSILNRIGIIVSENITPARRKKALKNLNILNDDSITALCNYKFGGTSSVSYKYMSGAIEAFLNGDIYGKHQASHIEETATESVKHTKLPVFDKDFEFFKNPVVFRAINESRKVINAIIEKYGSPSAINIEVGSEVSRSFANRTADKNEQTKRMKEKDAAKKAIAELLGVDIASVTSKMIDRYFLGELQGWKCMYSGKEINKEECLRGSKTYEIDHIVPFSLILDNTLNNKALVLTSENQLKKQQTPLMYLSGERRKNFIGTVNELFRAKKIKKKKYAYLLQPDLNDEKMSEWKSRNLNDMRYISRFMVGYLKENLKFDNSSKSEGRWQNVYAVKGSLTSMFRKLWLNETTWGRADKASIKAETYLDHAVDAVVIGNCLPVYVEIAQVNLRLRDIYKSNGRQFVAEYWDCFNKGVEMISRYYNIDKDTVRAFLKKSDRIPSLIPDLREEVDRRFVDHAIYSKYQKEVADHEGKDFKKPTYEEAEQAYRVSMENLYPTDLQFAHGLSMPLISCKPERKYRGKITADNPVKLREIDSKLYTLSKKEIGKIERKDIEKIYTSDTQLIAYLIELFDGAKDTATLGDIMKEKGISEIRTKNGNAIRKLTLRNICNKDFLKKEIDENNHTYLDTAKYYCVELYKDIKDKLRVQGIKRADIIPQNGKLCLAPWYKQPDGFFKHVMYLQKNDYLKVYENGELLFCGYYLSVEDIRNSKLYFIIDNQPGQNRKENCKSIHIKSEVKKYTVDILGKIGKKEIKCGEPLSSAKVKK

SEQ ID NO: 2610 - protein, 1136 aa, unidentified
  REGION 1..1136: note = Category: MG81 effectors
  REGION 1..1136: note = Description: MG81-899 effector
  source 1..1136: note = uncultivated organism sequence
MKYVIGMDIGIGSIGWSVIRSDADCKRIEDFGVRIFDPGENAGDRKRKSNSQIRREYRSVRRVLRRRKHRKELLKAHLENIGLTTIDRINEYFKHADGDIISLRVKGLDKKLAPEEIAACLINIANRRGYRPFYENEELSQYEKTSLNKTRQFMLSGEYRTSAEMILKNEQFDSEESEYRSYRNRSGNEETVLIERKWLRDEVEKILKKQSEFYPCLNDRNTNAIKRIIFDQRDFEDGPGDKNDPFRRYTGFLESMGQCRFYPDEKRGYRATLTADTYSLVNELSQYSYVDENGCFVFDSALAHDLIASALKNAKFTKSDFNKICKAHGIVPIYGGKGKDTDISRCFKFLKAIKPILKADGFDWETVCNIDTASDPDSILNRIGIIVSENITPARRKKALKNLNILNDDSITALCNYKFGGTSSVSYKYMSGAIEAFLNGDIYGKHQASHIEETATESIKHTKLPVFDKDFEFFKNPVVFRAINESRKVINAIIEKYGSPSAINIEVGSEVSRSFANRTADKNEQTKRMKEKDAAKKAIAELLGVDIASVTSKMIDRYFLGELQGWKCLYSGKEINKEECLGGSKAYEIDHIVPFSLILDNTLNNKALVLTSENQLKKQQTPLMYLSGERRKNFIGTVNELFRAKKINKKKYAYLLQPDLNDEKMSEWKSRNLNDMRYISRFMVGYLKENLKFDNSSKSEGRWQNVYAVKGSLTSMFRKLWLNETTWGRADKASIKAETYLDHAVDAVVIGNCLPVYVEIAQVNLRLRDIYKSNGRQFVAEYWDCFNKGVEMISRYYNIDKDTVRAFLKKSDRIPSLIPDLREEVDRRFVDHAIYSKYQKEIADHEGKKFKEPTYEEAEQAYRVSMENLYPTDLQFAHGLSVPLISCKPERKYRGEITAANPVKLREIDGKLYTLSRKEIGKIERKDIEKIYTSDTQLIAYLIELFDGAKDTATLGDIMKEKSISEIRTKNGNAIRKLTLRNICNKDFLKKEIDENNHTYLDTAKYYCVELYKDIKNQLQVQGIKRADIILQNGKLCLAPWYKQPDDYFKHVMYLQKNDYLKVCKNGKLSFCGYYRSAAGLTNSRLYFIIDNQPEDKKKYITLKLEVKKYSVDILGKIGKKEIKCGEPLSSAKVKK

SEQ ID NO: 2611 - protein, 495 aa, unidentified
  REGION 1..495: note = Category: MG81 effectors
  REGION 1..495: note = Description: MG81-900 effector
  source 1..495: note = uncultivated organism sequence
MPKEEKESCCVLQLRLYPEPWQVQIIETRFKVLEHLKNSLIALELRKLRNLEKTRAYREIQEQIKLADDKSKIKLYAKRRKLLKDAGFSEFVFKDDITPMQKHFAAHIATHVAHRAASEVWRAFDKFLFGNGKMVHYVRRGTLRSASNQTAGTTMTLENDYFKWKGGRDKNSIAINIRVAKPTTYYEKEMLQKKAKYFRIVRKWGKIGYKYYLQITLAGLPAVKPRLIANEKKVGIDIGPSSIAIVSDKKVELRALADKVQNNHIEKCSLQRSMDRSRRNLNPQNYNEDGTIRRGIRLNWTFSKHYIEMRGKVRMLERKNVDIRKYQHTCLANEVISLGTDVYIEQMSFKGLQRRAKETTYREDGRPKRKKRFGKSIANRAPAMFVEILGRKLTTIVGTELNKVDTFKFRASQYDHTNGSYKKKLLKERWAQLSNGDRIQRDLYSAFLLKNSNADLNSTNVEQCNATYDVFKIMHDDCITKLKSEKKSCLPSFGV

SEQ ID NO: 2612 - protein, 559 aa, unidentified
  REGION 1..559: note = Category: MG81 effectors
  REGION 1..559: note = Description: MG81-901 effector
  source 1..559: note = uncultivated organism sequence
MAKKISTDADTTLRAYKFRLDPTQAQASALAQCAGAARYAYNLLTAHNLDVSRARADYWHTRIDAGADETTVKAELKALAKSDAAYKSIGYAAYGTQHLTPEINRHRAASKAIESGADPAIVWPETERSSEPWMHTIPRRVLVSGLQSADKAWKNFFDSRTGVRAGRLVGTPRFKRKGVSRDSFTIPAPETIGAYGTAYLRGEPEYARRKAQLKRCGIKTTPTIEDYRHVRLSHLGVIRTHDTTRHLVKAVRAGAQVRSYTVSRAANRWYVSILVELTRPSASPTRAQRSAGAVGVDLGVRYLAALSDEQAPQRFAQYPSLEFTGDGAPTLANPRWARAAEKRLVRLQRALSRAQKGSNRRARIVQQIARHHHLVALRRESGLHQVSKRLSTGYTLIGLEDLAVAGMTASAAGTIEAPGKNVRQKAGLNRSILDAAFSTLRRQLEYKASWYGSQVQIIDRFFASSQMCSACGARAKTKLDLRVRVFECAACGVRIDRDVNAARNIRAEAVRMYEAQLAPGTGESLNGRGVTDSDAAGSVVLGDVALDASRPAASGGGSP

SEQ ID NO: 2613 - protein, 521 aa, unidentified
  REGION 1..521: note = Category: MG81 effectors
  REGION 1..521: note = Description: MG81-902 effector
  source 1..521: note = uncultivated organism sequence
MSTAAETSSAPQGTIERHVAFKFCLDPNQEQLVALGRDGGASRATYNMLVGYNTDVMKTRNKYWAKRREEGATDDEIKAELKTLTKEDPKFKALGYMAFAKNHLTPEIAHHRACAKAIEEGTPVEEVWGEGERSKEPWLHTVSRRVLVSGLMSADKALKNFFDSRTGKRAGGKMGAPKFKSRASNSDSFTIYAPDTMGGYGAPYLRGEPAYHDAKARMKRRGDKGTPTIGDYRHVRLAHLGTFRIHGNTRRMMRTIRKGGVIKSFTVSQVADRWYVSFLVEMTVPSPKSTRKQKKAGAVGVDLGVKYMAALSDTDAPKRFNPDSGVNFTDGTKPTIENPRWLKHAENRIAKLQQKIARQVKGSNRRTLNVRKLAKTHHIVALRRETGLHQLTKNLTTRYALIGIEDLNVAGMTASASGTVENPGKNVAQKAGLNRAVLDVAFGTFRSQLEYKSAWYGSAVQVIDRYYPSSQTCSNCGKRPDAKLTLNNRVYKCGHCHAVIDRDLNAAINIRREAERLHAEA

SEQ ID NO: 2614 - protein, 1134 aa, unidentified
  REGION 1..1134: note = Category: MG81 effectors
  REGION 1..1134: note = Description: MG81-903 effector
  source 1..1134: note = uncultivated organism sequence
MKYVIGMDIGIGSIGWSVIRSDADCKRIEDFGVRIFDPGENASDRKSNSQIRREYRSVRRVLRRRKHRKELLKAHLENIGLTTIDRINEYFKHADGDIISLRVKGLDKKLAPEEIAACLINIANRRGYRPFYENEELSQYEKTSLNKTRQFMLSGEYRTSAEMILKNEQFDSEESEYRSYRNRSGNEEIVLIERKWLRDEVEKILKKQSEFYPCLNDRNTNAIKRIIFDQRDFEDGPGDKNDPFRRYTGFLESMGQCRFYPDEKRGYRATLTADTYSLVNELSQYSYVDENGCFVFDSALAHDLIASALKNAKFTKSDFNKICKAHGIVPIYGGKGKDTDISRCFKFLKAIKPILEADGFDWETVCNIDTASDPDSILNRIGIIVSENITPARRKKALKNLNILNDDSITALCNYKFGGTSSVSYKYMSGAIEAFLNGDIYGKHQASHIEETATESVKHTKLPVFDKDFEFFKNPVVFRAINESRKVINAIIEKHGSPSAINIEVGSEVSRSFANRTADKNEQTKRMKEKDAAKKAIAELLGVDIASVTSKMIDRYFLGELQGWKCLYSGKEINKEECLRGSKAYEIDHIVPFSLILDNTLNNKALVLTSENQLKKQQTPLMYLSGEQRKNFIGTVNELFRAKKIKKKKYAYLLQPDLNDEKMSEWKSRNLNDMRHISRFMVGYLKENLKFDNFSKSEGRWQNVYAVKGSLTSMFRKLWLNETTWGRADKASIKAETYLDHAVDAVVIGNCLPVYVEIAQVNLRLRDIYKSNGRQFVAEYWDCFNKGVEMISRYYNIDKDTVRAFLKKSDRIPSLIPDLREEVDRRFVDHAIYSKYQKEIADHEGKKFKEPTYEEAEQAYRVSMENLYPTDLQFAHGLSMPLISCKPERKYRGEITAANPVKLREIDGKLYTLSKKEIGKIERKDIEKIYTSDTQLIAYLIELFDGAKDTATLGDIMKEKGISEIRTKNGNAIRKLTLRNICNKDFLKKEIDENNHTYLDTAKYYCVELYKDIKNQLQVQGIKRADIILQNGKLCLAPWYKQPDDYFKHVMYLQKNDYLKVYKNGKLSFCGYYRSAAGLTNSRLYFIIDNQPEDKKKYITLKLEVKKYPVDILGKIGKKEIKCGEPLSSAKVKK

SEQ ID NO: 2615 - protein, 537 aa, unidentified
  REGION 1..537: note = Category: MG81 effectors
  REGION 1..537: note = Description: MG81-904 effector
  source 1..537: note = uncultivated organism sequence
MISDEEYKKLLKQYHKLSDRHILVVETDMPYSDVLKVVILSDKIRKAGNELVSFMRKNYDQLIRTKKYRKLLKLYGSTKDKKKRKDLADQLNEMQKAYNVTWDYCRKSMIPIGKKYGIDAVFALTKAEDVWRGIEKCLYGNGKAIHFSKYGELPCIRAKQINRGIPISVKDDRLQFKLGKTAFGIQVNDRFQQDEADAVLTYLAESEIVDNKAVNTLMEDAYYIDTYRPCYATLVIKMIRGRYRIYLHLTIEGKAKPKYDKYGNLRHKYGKGMIGADIGTQTVAYTSDTEVGLKNLSERGNSIQTSERKERLLYRAMDRSRRAANPQNYNEDGTVKKGRKTWKYSNHYKKLKAKHSELCRINAVNRQLAINEDANHLRSLGDTFVTEPKNASKLMKRAKETAVNDKGRFNKKKRFGKSIKNRCPSGFQTTVEKKFKTTGGTYIEVPNNYRASQYDHTVDDYIKKKLSDRLYKLQDGTEVQRDWYSSFLLYCYDYKIQNIDKNKCITKFDNCYKKEKALITWIKAHKIKVLNSGIKIA

SEQ ID NO: 2616 - protein, 567 aa, unidentified
  REGION 1..567: note = Category: MG81 effectors
  REGION 1..567: note = Description: MG81-905 effector
  source 1..567: note = uncultivated organism sequence
MTKRKKHQITEYEKCLREYHKASPRHVIVLETDLTEDEKRHLFHQADLLRQCGNELLGIMKRHLDQLLRTKKYRGLRKSYGKISKSIKSLQQIKELSNVQKRHLKDQKKNLQTVSDQMNEMQEEYHITWEYCRNTMKTLRLKYEQTSVIALSRAEDIWAAVSKVLYSDGERLHFKKRGDLPELRAKQFHKEIIGRVKNGSLEFRYGKVSLPVIRKETDLWLMDELEAVESYLKDPSFHDAYAIDQMKHGEIVSTYRPCYASIVCKTIRGKLRVYLHLTVEGLPFPKRTKDGVIKHLCGDGIVGCDIGTQTIAYTSDHVVGLENLAERGNSIRCVERQQRLVQRAMDRSRRAMNPDNYNADGTIRKGKKTWIKSKRYQKLQLSYRELCRVSAENRKLAIHEQVHKMRSLGDVFVTEAKNAKKLQKRANPEDPLNKNGKPKRKKRFGRSIQNRCPGYFQAKIQQLFESTGGTYIEVPSDYRASQYDHTVDDYIKKKLSQRMFNLKDGTKVQRDWYSSFLLYCIDLITKTIDRQKCLATFETQLNKEHAMIEEIIRLKKRIMNSGIRVAA

SEQ ID NO: 2617 - protein, 606 aa, unidentified
  REGION 1..606: note = Category: MG81 effectors
  REGION 1..606: note = Description: MG81-906 effector
  source 1..606: note = uncultivated organism sequence
MKPDHIHVFVDVPQTAATCDVVGTFKDISAIELFKAFPQLIQSYAGCGILWSRGYFVSTVIKIILRSRKMITDKGHKRHLKQFHKFSDRHILAIETDMPYSDIQKVVKLSNKIRKAGNELVGLMRKNYNQLMRTKRYRKLLFLYGDSKDKDKRRTYAKQLNEMQKAYNITWEYCRTSMIPIGKKYGVDAVFALTKAEDIWRGIEKCLYGNGNAIHFSRYGEMPCIRAKQINRGIPIFVRDNKLQFKLGRMVFGIQINDRFQQDEVDAVLSYLAESEILDDRAVSILIKDGYCIDTYRPCYATLVPRMIRGKYRVYLHLTIEGKAKQKYDKHGNPRHKYGKGMIGADIGTQTVAYTSDTEVGLKNLSERGNSIQTSERKERLLYRAMDRSRRATNPQNYNDDGTVKKSRKTWKYSNRYKKLKEKHSELCRINAINRQLAINEDANHLRSLGDVFITEPKNAGRLMRRAKETTVNSKGKFNRKKRFGRSIKNRCPSGFQAAVEQKFKVSGGTYIEVSNDYRASQYDHTVDDYIKKRLSDRMYKLQDGTEVQRDWYSSFLLHCYDYRTKDIDKNKCISEFDKCYSKEKALIEWIKANEIKVLNSGIKIA

SEQ ID NO: 2618 - protein, 519 aa, unidentified
  REGION 1..519: note = Category: MG81 effectors
  REGION 1..519: note = Description: MG81-907 effector
  source 1..519: note = uncultivated organism sequence
MIQPELKAYRRCSDRHVLVLETNLTYVEKCQFFHYADLIRKAGNELTGIMKKRYDQLVRTKRYRKLKSLYKKYKDADNKKALKDVCDQMKKMQKQYDVTWDYCRTSMIPIGKKYGIDAVFALTKAEDVFRGIEKCLYSDGETIHFKKRGDLPCIRAKQLNRGIIMKQMNFKFKNIEFGAKIKDRYEQEEVDAILYYLKNTELMDSIAANTYKETNICVSTYRPCYVSLVCKKIRGKLRVYVHITIEGLSKPKQDRFGNFKHNKGKGVVGCDIGTQTIAYTTETKAGLKNLAERGSCIEVNERKERRIYRAMDRSRRAMNPDNYNEDGTIKKGKKTWVLSNRYKKLRTKHTELCRINATNRHLAINEDVNELRSLGDVFVTEPKNAKKLQKKAKTGKRKKRFGRSIKNRCPGYFQSQAKRKFRIYVEVPNDYKASQYDHTSDEYVKKSLSQRMYKLQDGTMVQRDLYSSFLLYCIDLNTNKIDKNKCIHEFEKQYKNQNETIEYIQMNQIKVMNSGIRVN

SEQ ID NO: 2619 - protein, 1140 aa, unidentified
  REGION 1..1140: note = Category: MG81 effectors
  REGION 1..1140: note = Description: MG81-908 effector
  source 1..1140: note = uncultivated organism sequence
MKYVIGMDIGIGSIGWSVIRSDADCKRIEDFGVRIFEPGENASDRKSNSQIRREYRSVRRVLRRRKHRKELLKAHLENIGLTTIDRINEYFKHADGDIISLRVKGLDKKLAPEEIAACLINIANRRGYRPFYENEELSQYEKTSLNKTRQFMLSGEYRTSAEMILKNEQFDSEESEYRSYRNRSGNEETVLIERKWLRDEVEKILKKQSEFYPCLNDRNTNAIKRIIFDQRDFEDGPGDKNDPFRRYTGFLESMGQCRFYPDEKRGYRATLTADTYSLVNELSQYSYVDENGCFVFDSALAHDLIASALKNAKFTKSDFNKICKAHGIVPIYGGKGKDTDISRCFKFLKAIKPILEADGFDWETVCNIDTASDPDSILNRIGIIVSENITPARRKKALKNLNILNDDSITALCNYKFGGTSSVSYKYMSGAIEAFLNGDIYGKHQASHIEETATESVKHTKLPVFDKDFEFFKNPVVFRAINESRKVINAIIEKYGSPSAINIEVGSEVSRSFANRTADKNEQTKRMKEKDAAKKAIAELLGVDIASVTSKMIDRYFLGELQGWKCMYSGKEINKEECLRGSKTYEIDHIVPFSLILDNTLNNKALVLTSENQLKKQQTPLMYLSGERRKNFIGTVNELFRAKKIKKKKYAYLLQPDLNDEKMSEWKSRNLNDMRYISRFMVGYLKENLKFDNSSKSEGRWQNVYAVKGSLTSMFRKLWLNETTWGRADKASIKAETYLDHAVDAVVIGNCLPVYVEIAQVNLRLRDIYKSNGRQFVAEYWDCFNKGVEMISRYYNIDKDTVRAFLKKSDRIPSLIPDLREEVDRRFVDHAIYSKYQKEIADHEGKKFKEPTYEEAEQAYRTSMENLYPTDLQFAHSLSMPLISCKPERKFSGKITADNPVKLREIDGKLYTLSKKRIYSAADKDKIKRTDIEKIYTSDANLIAYLIELFDGAKDTATLRDIMKENGISEIRTKNGNAIRKLTLRNICDKDFLKKEIDENNHTYLDTAKYYCVELYKDIKDKLRVQGIKRADIIPQNGKLCLAPWYKQPDNYFKHVMYLQKNDYLKVYKNGKLSFCGYYRSAAGLTNSKVHFIIDNQPEDKEKYITLKLEVKKYPVDILGKIGKKEIKCGEPLSSAKVKK

SEQ ID NO: 2620 - protein, 1134 aa, unidentified
  REGION 1..1134: note = Category: MG81 effectors
  REGION 1..1134: note = Description: MG81-909 effector
  source 1..1134: note = uncultivated organism sequence
MKYVIGMDIGIGSIGWSVIRSDADCKRIEDFGVRIFDPGENASDRKSNSQIRREYRSVRRVLRRRKHRKELLKAHLENIGLTTIDRINEYFKHADGDIISLRVKGLDKKLAPEEIAACLINIANRRGYRPFYENEELSQYEKTSLNKTRQFMLSGEYRTSAEMILKNEQFDSEESEYRSYRNRSGNEETVLIERKWLRDEVEKILKKQSEFYPCLNDRNTNAIKRIIFDQRDFEDGPGDKNDPFRRYTGFLESMGQCRFYPDEKRGYRATLTADTYSLVNELSQYSYVDENGCFVFDSALAHDLIASALKNAKFTKSDFNKICKAHGIVPIYGGKGKDTDISRCFKFLKAIKPILEADGFDWETVCNIDTASDPDSILNRIGIIVSENITPARRKKALKNLNILNDDSITALCNYKFGGTSSVSYKYMSGAIEAFLNGDIYGKHQASHIEETATESVKHTKLPVFDKDFEFFKNPVVFRAINESRKVINAIIEKYGSPSAINIEVGSEVSRSFANRTADKNEQTKRMKEKDAAKKAIAELLGVDIASVTSKMIDRYFLGELQGWKCMYSGKEINKEECLRGSKAYEIDHIVPFSLILDNTLNNKALVLTSENQLKKQQTPLMYLSGERRKNFIGTVNELFRAKKIKKKKYAYLLQPDLNDEKMSEWKSRNLNDMRHISRFMVGYLKENLKFDNSSKSEGRWQNVYAVKGSLTSMFRKLWLNETTWGRADKASIKAETYLDHAVDAVVIGNCLPVYVEIAQINLRLRDIYKSNGRQFVAEYWDCFNKGVEMISCYYNIDKDTVRAFLKKSDRIPSLIPDLREEVDRRFVDHAIYSKYQKEIADHEGKKFKEPTYEEAEQAYRVSMENLYPTDLQFAHSLSMPLISCKPERKYRGEITAANPVKLREIDGKLYTLSKKEIGKIERKDIEKIYTSDTQLIAYLIELFDGAKDTATLGDIMKEKGISEIRTKNGNAIRKLTLRNICNKDFLKKEIDENNHTYLDTAKYYCVELYKDIKNQLQVQGIKRADIILQNGKLCLAPWYKQPDDYFKHVMYLQKNDYLKVYKNGKLSFCGYYRSAAGLTNSRLYFIIDNQPEDKKKYITLKLEVKKYPVDILGKIGKKEIKCGEPLSSAKVKK

SEQ ID NO: 2621 - protein, 1134 aa, unidentified
  REGION 1..1134: note = Category: MG81 effectors
  REGION 1..1134: note = Description: MG81-910 effector
  source 1..1134: note = uncultivated organism sequence
MKYVIGMDIGIGSIGWSVIRSDADCKRIEDFGVRIFDPGENASDRKSNSQIRREYRSVRRVLRRRKHRKELLKAHLENIGLTTIDRINEYFKHADGDIISLRVKGLDKKLAPEEIAACLINIANRRGYRPFYENEELSQYEKTSLNKTRQFMLSGEYRTSAEMILKNEQFDSEESEYRSYRNRSGNEEIVLIERKWLRDEVEKILKKQSEFYPCLNDRNTNAIKRIIFDQRDFEDGPGDKNDPFRRYTGFLESMGQCRFYPDEKRGYRATLTADTYSLVNELSQYSYVDENGCFVFDSALAHDLIASALKNAKFTKSDFNKICKAHGIVPIYGGKGKDTDISRCFKFLKAIKPILEADGFDWETVCNIDTASDPDSILNRIGIIVSENITPARRKKALKNLNILNDDSITALCNYKFGGTSSVSYKYMSGAIEAFLNGDIYGKHQASHIEETATESVKHTKLPVFDKDFEFFKNPVVFRAINESRKVINAIIEKYGSPSAINIEVGSEVSRSFANRTADKNEQTKRMKEKDAAKKAIAELLGVDIASVTSKMIDRYFLGELQGWKCMYSGKEINKEECLRGSKAYEIDHIVPFSLILDNTLNNKALVLTSENQLKKQQTPLMYLSGERRKNFIGTVNELFRAKKIKKKKYAYLLQPDLNDEKMSEWKSRNLNDMRHISRFMVGYLKENLKFDNSSKSEGRWQNVYAVKGSLTSMFRKLWLNETTWGRADKASIKAETYLDHAVDAVVIGNCLPVYVEIAQINLRLRDIYKSNGRQFVAEYWDCFNKGVEMISCYYNIDKDTVRAFLKKSDRIPSLIPDLREEVDRRFVDHAIYSKYQKEIADHEGKKFKEPTYEEAEQAYRVSMENLYPTDLQFAHSLSMPLISCKPERKYRGEITAANPVKLREIDGKLYTLSKKEIGKIERKDIEKIYTSDTQLIAYLIELFDGAKDTATLGDIMKEKGISEIRTKNGNAIRKLTLRNICNKDFLKKEIDENNHTYLDTAKYYCVDLYKDIKNQLQVQGIKRADIILQNGKLCLAPWYKQPDDYFKHVMYLQKNDYLKVYKNGKLSFCGYYRSAAGLTNSRLYFIIDNQPEDKKKYITLKLEVKKYPVDILGKIGKKEIKCGEPLSSAKVKK

SEQ ID NO: 2622 - protein, 1134 aa, unidentified
  REGION 1..1134: note = Category: MG81 effectors
  REGION 1..1134: note = Description: MG81-911 effector
  source 1..1134: note = uncultivated organism sequence
MKYVIGMDIGIGSIGWSVIRSDADCKRIEDFGVRIFDPGENASDRKSNSQIRREYRSVRRVLRRRKHRKELLKAHLENIGLTTIDRINEYFKHADGDIISLRVKGLDKKLAPEEIAACLINIANRRGYRPFYENEELSQYEKTSLNKTRQFMLSGEYRTSAEMILKNEQFDSEESEYRSYRNRSGNEETVLIERKWLRDEVEKILKKQSEFYPCLNDRNTNAIKRIIFDQRDFEDGPGDKNDPFRRYTGFLESMGQCRFYPDEKRGYRATLTADTYSLVNELSQYSYVDENGCFVFDSALAHDLIASALKNAKFTKSDFNKICKAHGIVPIYGGKGKDTDISRCFKFLKTIKPILEADGFDWETVCNIDTASDPDSILNRIGIIVSENITPARRKKALKNLNILNDDSITALCNYKFGGTSSVSYKYMSGAIEAFLNGDIYGKHQASHIEETATESVKHTKLPVFDKDFEFFKNPVVFRAINESRKVINAIIEKYGSPSAINIEVGSEVSRSFANRTADKNEQTKRMKEKDAAKKAIAELLGVDIASVTSKMIDRYFLGELQGWKCLYSGKEINKEECLGGSKAYEIDHIVPFSLILDNTLNNKALVLTSENQLKKQRTPLMYLSGERRKNFIGTVNELFRAKKIKKKKYAYLLQPDLNDEKMSEWKSRNLNDMRYISRFMVGYLKENLKFDNSSKSEGRWQNVYAVKGSLTSMFRKLWLNETTWGRADKASIKAETYLDHAVDAVVIGNCLPVYVEIAQVNLRLRDIYKSNGRQFVAEYWDCFNKGVEMISRYYNIDKDTVRAFLKKSDRIPSLIPDLREEVDRRFVDHAIYSKYQKEIADHEGKDFEKPTYEEAEQAYRVSMENLYPTDLQFAHGLSMPLISCKPERKYRGEITAANPVKLREIDGKLYTLSKKEIGKIERKDIEKIYTSDTQLIAYLIELFDGAKDTATLGDIMKEKGISEIRTKNGNAIRKLTLRNICNKDFLKKEIDENNHTYLDTAKYYCVELYKDIKNQLQVQGIKRADIILQNGKLCLAPWYKQPDDYFKHVMYLQKNDYLKVYKNGKLSFCGYYRSAAGLTNSRLYFIIDNQPEDKKKYITLKLEVKKYSVDILGKIGKKEIKCGEPLSSAKVKK

SEQ ID NO: 2623 - protein, 991 aa, unidentified
  REGION 1..991: note = Category: MG81 effectors
  REGION 1..991: note = Description: MG81-912 effector
  source 1..991: note = uncultivated organism sequence
MKYVIGMDIGIGSIGWSVIRSDADCKRIEDFGVRIFDPGENASDRKSNSQIRREYRSVRRVLRRRKHRKELLKAHLENIGLTTIDRINEYFKHADGDIISLRVKGLDKKLAPEEIAACLINIANRRGYRPFYENEELSQYEKTSLNKTRQFMLSGEYRTSAEMILKNEQFDSEESEYRSYRNRSGNEEIVLIERKWLRDEVEKILKKQSEFYPCLNDRNTNAIKRIIFDQRDFEDGPGDKNDPFRRYTGFLESMGQCRFYPDEKRGYRATLTADTYSLVNELSQYSYVDENGCFVFDSALAHDLIASALKNAKFTKSDFNKICKAHGIVPIYGGKGKDTDISRCFKFLKAIKPILEADGFDWETVCNIDTASDPDSILNRIGIIVSENITPARRKKALKNLNILNDDSITALCNYKFGGTSSVSYKYMSGAIEAFLNGDIYGKHQASHIEETATESVKHTKLPVFDKDFEFFKNPVVFRAINESRKVINAIIEKYGSPSAINIEVGSEVSRSFANRTADKNEQIKRMKEKDAAKKTIAELLGVDIASVTSKMIDRYFLGELQGWKCLYSGKEINKEECLGGSKAYEIDHIVPFSLILDNTLNNKALVLTSENQLKKQRTPLMYLSGEQRKNFIGTVNELFRAKKIKKKKYAYLLQPDLNDEKMSEWKSRNLNDMRYISRFMVGYLKENLKFDNSSKLEGRWQNVYAVKGSLTSMFRKLWLNETTWGRADKASIKAETYLDHAVDAVVIGNCLPVYVEIAQVNLRLRDIYKSNGRQFVAEYWDCFNKGVEMISRYYNIDKDTVRAFLKKSDRIPSLIPDLREEVDRRFVDHAIYSKYQKEIADHEGKKFKEPTYEEAEQAYRVSMENLYPTDLQFAHGLSMPLISCKPERKYRGEITAANPVKLREIDGKLYTLSRKEIGKIERKDIEKIYTSDTQLIAYLIELFDGAKDTATLGDIMKEKKHLGNTNQERQRHSQTHFEKYMQQGFLKKRN

SEQ ID NO: 2624 - protein, 1312 aa, unidentified
  REGION 1..1312: note = Category: MG81 effectors
  REGION 1..1312: note = Description: MG81-913 effector
  source 1..1312: note = uncultivated organism sequence
MKISKVNHVRTGTTVTQMQGEGIIYVNPSQNKNAKKDLTEHIKKLNEKAKVLYSPINPVNSITVSMDKNEKQDVNASAKAIKYLVNGILRKNENGIPDCDSLLSQIREKAREAHTSSINPDKLAEKIVDRCLRKKLCKKSEIAKALFAAILSSNKAERLNLLDKDEVKAFFDLAHEDYYKTEQLKEIEDSIVKKDVRVQVKEGMDGEKHLVLSSADNPKKHFYFDFIKEYTSKDNAGREEMLIRFRQLIILFYSGVKAYHLSIGSDVGAWTFGSSLPDVADNFNDEAAALITECQIQQAEKEKYGKKKNILSDKLKNCKYGTPEYRNLLGQETDCKTAIASCNSAIGNAQKKIKVLLADTICNNYRTAVKTEGLAEGDIFWIGYIQGIAEKLFEKKSSYTMYKMSTKYLYEVTFNEWLSFVALKVIDMGKAVYHFAMPDCSDICSGAEIRAGKVQPLFEDGITSFDYERIKAKETITREFAVHATYAAGIFSNAVADKEYRLHTETDEKGRTLNFEDPLQYKEKEWVQALVPDAKKKLLMFFGGQSGWDGTEIAAKSDLEVTSAFQEMINVIRNSNYHYAGSIVSPKEETITIMRGLFDKEFSELGRILREKYYSNNVPVYYGIGDIDKLMTFLYTGESKREAQIPSFGNIFKKKDIPDFVKKNIAGSLLAKYNVQELEKFRSALYFVLKEIYYYGFLKETNIKDRFLAFLNKSKNSAKNPDAYNSFQSRLKDLDADCSFGEICQMYMTDYNQQNQGNYKVKSQTQEEKDRKDDKGHKYEHFKMLLYVTIQGAFTDYLAEKKEIFSFLMAPDLKENFFGSNAAKGFISSWKADLFNETKKVLSEDAYVLSWYALAHLLSPKQLNHLQGDIKSYIQFVGEINAREKSVLGRERDTRLTDTTGDFEKILKVLEFVMNFVGKTSNVLTDYFADADDYAKHLYSYVSYAGKKEEKNNAALAAFCQKAITQKDITLTDKIGIYHDGINPIVNTNVVKAMMYGNETILSEAVSKVSGDLFHGDIVSYFRLKKELEKVFEKGECANREEQTKLREFQNLKNRVELYDIAVFTDIINDYMGELVNMAYLRERDLMYYQLGYHYLRQEYATVEEKYKTISEENICITSGALLYQIMAMYSYNLPIIYKGKEGTYKYSNGGKINKFVKNYCGENLEDYDNVYYSGLELFEQRSRHDELHQFRNDIDHLKYFISADKSILDMYSQVYNGFFSYDIKLKKSVSYIFTNILAKYFVTADIKLNAKQVDGKRAVKLSVSEMSSDSFSYKEKVKMRDGKERERAYYLPVRSEGFLKDTKKLVEYISK

SEQ ID NO: 2625 - protein, 537 aa, unidentified
  REGION 1..537: note = Category: MG81 effectors
  REGION 1..537: note = Description: MG81-914 effector
  source 1..537: note = uncultivated organism sequence
MISDKEYKKLLKQFHKLSDRHILVVETDMPSSDVQKVVILSDKIRKAGNELVGLMRKNYDQLMRTKKYRKLLKLYGSTNDKKKHRDLANQLNEMQKQYNVTWDHCRNAMIHIGKKYSIDAVFALTKAEDIWRGIEKCLYNNGKTIHFSKYGELPCIRAKQINRGISMSVKDNELKFKLKGNVFGIQVKDRFQTDEVCAVLEYLSRSEIINDKAINKFLDKAYCIDTYRPCYATLVPKFIRGKYRVYLHLTIEGKAKPKYDRFGNPRHKFGKGIIGADIGTQTVAYTSNTEVGLKNLSERGNSIQTSERRERLLYRAMDRSRRATDPQNYNDDGTVKKGRKTWKYSNHYKKLKAKHSELCRINAINRQLAINEDANHLRSLGDVFITEPKNASKLMKRTKDTTVNSKGKFHKKKRFGKSIKNRCPSGFQTTVERKFKVSGGIYIEVPNNYRASQYDHTADDYIKKKLSDRIYKLTDGTLVQRDWYSSFLLYCYDYRTKDIDKNKCISEFDKCYNKEKALIEWIKANKIKILNSGIKIS

SEQ ID NO: 2626 - protein, 1134 aa, unidentified
  REGION 1..1134: note = Category: MG81 effectors
  REGION 1..1134: note = Description: MG81-915 effector
  source 1..1134: note = uncultivated organism sequence
MKYVIGMDIGIGSIGWSVIRSDADCKRIEDFGVRIFEPGENASDRKSNSQIRREYRSVRRVLRRRKHRKELLKAHLENICLTTIDRINEYFKHADGDIISLRVKGLDKKLAPEEIAACLINIANRRGYRPFYENEELSQYEKTSLNKTRQFMLSGEYRTSAEMILKNEQFDSEESEYRSYRNRSGNEETVLIERKWLRDEVEKILKKQSEFYPCLNDRNTNAIKRIIFDQRDFEDGPGDKNDPFRRYTGFLESMGQCRFYPDEKRGYRATLTADTYSLVNELSQYSYVDENGCFVFDSALAHDLIASALKNAKFTKSDFNKICKAHGIVPIYGGKGKDTDISRCFKFLKAIKPILEADGFDWETVCNIDTASDPDSILNRIGIIVSENITPARRKKALKNLNILNDDSITALCNYKFGGTSSVSYKYMSGAIEAFLNGDIYGKHQASHIEETATESVKHTKLPVFDKDFEFFKNPVVFRAINESRKVINAIIEKYGSPSAINIEVGSEVSRSFANRTADKSEQTKRMKEKDAAKKAIAELLGVDIASVTSKMIDRYFLGELQGWKCLYSGKEINKEECLRGSKAYEIDHIVPFSLILDNTLNNKALVLTSENQLKKQRTPLMYLSGEQRKNFIGTVNELFRAKKIKKKKYAYLLQPDLNDEKMSEWKSRNLNDMRHISRFMVGYLKENLKFDNSSKSEGRWQNVYAVKGSLTSMFRKLWLNETTWGRADKASIKAETYLDHAVDAVVIGNCLPVYVEIAQVNLRLRDIYKSNGRQFVAEYWDCFNKGVEMISRYYNIDKDTVRAFLKKSDRIPSLIPDLREEVDRRFVDHAIYSKYQKEIADHEGKKFKEPTYEEAEQAYRTSMENLYPTDLQFAHGLSMPLISCKPERKYRGEITAANPVKLREIDGKLYTLSKKEIGKIERKDIEKIYTSDTQLIAYLIELFDGAKDTATLGDIMKEKGISEIRTKNGNAIRKLTLRNICNKDFLKKEIDENNHTYLDTAKYYCVELYKDIKNQLQVQGIKRADIILQNGKLCLAPWYKQPDDYFKHVMYLQKNDYLKVYKNGKLSFCGYYRSAAGLTNSRLYFIIDNQPEDKKKYITLKLEVKKYPVDILGKIGKKEIKCGEPLSSAKVKK

SEQ ID NO: 2627 - protein, 1289 aa, unidentified
  REGION 1..1289: note = Category: MG81 effectors
  REGION 1..1289: note = Description: MG81-916 effector
  source 1..1289: note = uncultivated organism sequence
MKISKVDHVKTGVSERPIEAGGMMYSYPDSKNDNIVLREHIKKLTNRTKNLYLAFVAPKTNGGKLSMAAECSGTFNFYIKNNILCPIDNRKSDEEILNGILNAGFMARAIRDGRNERNVSENDVNNTVNRCLRQSLRKKYFSGSDGIYIPDVMKKLCMAIYGKANYKSIISSIPENELKLLIAAIRADYTRENYIEKIANSIEKQNVPIQVSEDGRRIILSSAYNEKKSYIFDFLKKYASCDKAGQEEMLKNMRYLIVLFFFGREVAEDALNDTGFCAWSFGLTLKEYGEKVFSKEVYDLWNARENIPFSQKADIRNLGDRLKLEYSKALVEHYQGALSSDDLSDSDKKWIGYISDKAGKMFSDHNMSSYKFTCGYLCERTWEEWISFVAMKFVEIGKGAYNFTMSAMDEIAKGGPVSFGTVDERYKNGISSFDYERMAAKDHLSRNLATYVSFALNNLDSSARSLDVREKAEDILSSSNLELLTNAKTKVLRYFGGESSFENMPVKDMSAEDIVSDLVSYFKVTRNSCFHFVSGASEGVNSDLFRAVFDKECQNAGVILRKRFYSNNVAMFYSEKDISALMTEMYDSVRNNPAQIPSFNKVISRNEVRNFITQLIPVGNRAPLNNAETSELFKNSIYFVLKEIYYHDFLNEKNLMKRFWDEIDSLKAADEKEEKAHEAFAARVKTITSENDDFGLLCQEIMTEYNQQNNQKSKKASAKKDKETGEIKKIENNDVIYKHYVMLLYLGIRQAFYKFIEEKECYAFLKKPSIGKQPEEKDFIYGWSTDMHNGMDVSDPLIQSWYITSHFINQKQLNHLIGQFKNYITYLDSIENRAEQTGNRIRESSKDQLDLYMKLLAVLDFAKLNNSLVSNTLEDYFDDADEYAKYISGFIDFGGDTKEALQAFCNQKFKCGDATETLGKYYDGLNPIMERNIILASMFGNTAIASNVIDRVTEKEVKDFYKRKNKVADLLSRGVSSEDDLKAIRFYQNLKNRIELVDMLSITELTNELVSHLTGYAYLRERDLMYMQLGYHYVKLFYTDVVDMSNKFRVLNGDCNITDGAALYQIAAMYSYDLPLYVIDDEGRSIKPNKLQSIGSKVKVFAKEYCKDDYDVYKEGLNLFEDISGPKDGRHDEFIDIRKYIDHMKYFANQKKSILDMYSEMYGGFFSYNTKLKKSVSYVLPNILMADFIVARLGFEKGIKTVGEKEVSVPQMVVKEISTDYLTFKEIKSILANQGNEILKDPNKIVIGSGWKEEPSQNNKGRKSEGTFVAARSTKYCEAVGRLLVYKKE

SEQ ID NO: 2628 - protein, 1134 aa, unidentified
  REGION 1..1134: note = Category: MG81 effectors
  REGION 1..1134: note = Description: MG81-917 effector
  source 1..1134: note = uncultivated organism sequence
MKYVIGMDIGIGSIGWSVIRSDADCKRIEDFGVRIFEPGENASDRKSNSQIRREYRSVRRVLRRRKHRKELLKAHLENIGLTTIDRINEYFKHADGDIISLRVKGLDKKLAPEEIAACLINIANRRGYRPFYENEELSQYEKTSLNKTRQFMLSGEYRTSAEMILKNEQFDSEESEYRSYRNRSGNEETVLIERKWLRDEVEKILKKQSEFYPCLNDRNTNAIKRIIFDQRDFEDGPGDKNDPFRRYTGFLESMGQCRFYPDEKRGYRATLTADTYSLVNELSQYSYVDENGCFVFDSALAHDLIASALKNAKFTKSDFNKICKAHGIVPIYGGKGKDTDISRCFKFLKAIKPILEADGFDWETVCNIDTASDPDSILNRIGIIVSENITPARRKKALKNLNILNDDSITALCNYKFGGTSSVSYKYMSGAIEAFLNGDIYGKHQASHIEETATESVKHTKLPVFDKDFEFFKNPVVFRAINESRKVINAIIEKYGSPSAINIEVGSEVSRSFANRTADKNEQTKRMKEKDAAKKAIAELLGVDIASVTSKMIDRYFLGELQGWKCMYSGKEINKEECLRGSKTYEIDHIVPFSLILDNTLNNKALVLTSENQLKKQQTPLMYLSGERRKNFIGTVNELFRAKKIKKKKYAYLLQPDLNDEKMSEWKSRNLNDMRYISRFMVGYLKENLKFDNSSKSEGRWQNVYAVKGSLTSMFRKLWLNETTWGRADKASIKAETYLDHAVDAVVIGNCLPVYVEIAQVNLRLRDIYKSNGRQFVAEYWDCFNKGVEMISRYYNIDKDTVRAFLKKSDRIPSLIPDLREEVDRRFVDHAIYSKYQKEIADHEGKKFKEPTYEEAEQAYRVSMENLYPTDLQFAHGLSMPLISCKPERKYRGEITAANPVKLREIDGKLYTLSRKEIGKIERKDIEKIYTSDTQLIAYLIELFDGAKDTATLGDIMKEKSISEIRTKNGNAIRKLTLRNICNKDFLKKEIDENNHTYLDTAKYYCVELYKDIKNQLQVQGIKRADIILQNGKLCLAPWYKQPDDYFKHVMYLQKNDYLKVYKNGKLSFCGYYRSAAGLTNSRLYFIIDNQPEDKKKYITLKLEVKKYSVDILGKIGKKEIKCGEPLSSAKVKK

SEQ ID NO: 2629 - protein, 1138 aa, unidentified
  REGION 1..1138: note = Category: MG81 effectors
  REGION 1..1138: note = Description: MG81-918 effector
  source 1..1138: note = uncultivated organism sequence
MKYVIGMDIGIGSIGWSVIRSDADCKRIEDFGVRIFEPGENASDRKSNSQIRREYRSVRRVLRRRKHRKELLKAHLENIGLTTIDRINEYFKHADGDIISLRVKGLDKKLAPEEIAACLINIANRRGYRPFYENEELSQYEKTSLNKTRQFMLSGEYRTSAEMILKNEQFDSEESEYRSYRNRSGNEETVLIERKWLRDEVEKILKKQSEFYPCLNDRNTNAIKRIIFDQRDFEDGPGDKNDPFRRYTGFLESMGQCRFYPDEKRGYRATLTADTYSLVNELSQYSYVDENGCFVFDSALAHDLIASALKNAKFTKSDFNKICKAHGIVPIYGGKGKDTDISRCFKFLKAIKPILEADGFDWETVCNIDTASDPDSILNRIGIIVSENITPARRKKALKNLNILNDDSITALCNYKFGGTSSVSYKYMSGAIEAFLNGDIYGKHQASHIEETATESVKHTKLPVFDKDFEFFKNLVVFRAINESRKVINAIIEKYGSPSAINIEVGSEVSRSFANRTADKNEQTKRMKEKDAAKKAIAELLGVDIASVTSKMIDRYFLGELQGWKCMYSGKEINKEECLRGSKTYEIDHIVPFSLILDNTLNNKALVLTSENQLKKQQTPLMYLSGERRKNFIGTVNELFRAKKIKKKKYAYLLQPDLNDEKMSEWKSRNLNDMRYISRFMVGYLKENLKFDNSSKSEGRWQNVYAVKGSLTSMFRKLWLNETTWGRADKASIKAETYLDHAVDAVVIGNCLPVYVEIAQVNLRLRDIYKSNGRQFVAEYWDCFNKGVEMISRYYNIDKDTVRAFLKKSDRIPSLIPDLREEVDRRFVDHAIYSKYQKEVADHEGKDFKKPTYEEAEQAYRVSMENLYPTDLQFAHGLSMPLISCKPERKYRGKITADNPVKLREIDSKLYTLSKKEIGKIERKDIEKIYTSDTQLIAYLIELFDGAKDTATLGDIMKEKGISEIRTKNGNAIRKLTLRNICNKDFLKKEIDENNHTYLDTAKYYCVELYKDIKDKLRVQGIKRADIIPQNGKLCLAPWYKQPDGFFKHVMYLQKNDYLKVYENGELLFCGYYLSVEDIRNSKLYFIIDNQPGQNRKENCKSIHIKSEVKKYTVDILGKIGKKEIKCGEPLSSAKVKK

SEQ ID NO: 2630 - protein, 1134 aa, unidentified
  REGION 1..1134: note = Category: MG81 effectors
  REGION 1..1134: note = Description: MG81-919 effector
  source 1..1134: note = uncultivated organism sequence
MKYVIGMDIGIGSIGWSVIRSDADCKRIEDFGVRIFDPGENASDRKSNSQIRREYRSVRRVLRRRKHRKELLKAHLENIGLTTIDRINEYFKHADGDIISLRVKGLDKKLAPEEIAACLINIANRRGYRPFYENEELSQYEKTSLNKTRQFMLSGEYRTSAEMILKNEQFDSEESEYRSYRNRSGNEEIVLIERKWLRDEVEKILKKQSEFYPCLNDRNTNAIKRIIFDQRDFEDGPGDKNDPFRRYTGFLESMGQCRFYPDEKRGYRATLTADTYSLVNELSQYSYVDENGCFVFDSALAHDLIASALKNAKFTKSDFNKICKAHGIVPIYGGKGKDTDISRCFKFLKAIKPILEADGFDWETVCNIDTASDPDSILNRIGIIVSENITPARRKKALKNLNILNDDSITALCNYKFGGTSSVSYKYMSGAIEAFLNGDIYGKHQASHIEETATESVKHTKLPVFDKDFEFFKNPVVFRAINESRKVINAIIEKYGSPSAINIEVGSEVSRSFANRTADKNEQTKRMKEKDAAKKAIAELLGVDIASVTSKMIDRYFLGELQGWKCMYSGKEINKEECLRGSKTYEIDHIVPFSLILDNTLNNKALVLTSENQLKKQQTPLMYLSGERRKNFIGTVNELFRAKKIKKKKYAYLLQPDLNDEKMSEWKSRNLNDMRHISRFMVGYLKENLKFDNSSKSEGRWQNVYAVKGSLTSMFRKLWLNETTWGRADKASIKAETYLDHAVDAVVIGNCLPVYVEIAQVNLRLRDIYKSNGRQFVAEYWDCFNKGVEMISRYYNIDKDTVRAFLKKSDRIPSLIPDLREEVDRRFVDHAIYSKYQKEIADHEGKKFKEPTYEEAEQAYRVSMENLYPTDLQFAHGLSMPLISCKPERKYRGEITAANPVKLREIDGKLYTLSRKEIGKIERKDIEKIYTSDTQLIAYLIELFDGAKDTATLGDIMKEKSISEIRTKNGNAIRKLTLRNICNKDFLKKEIDENNHTYLDTAKYYCVELYKDIKNQLQVQGIKRADIILQNGKLCLAPWYKQPDDYFKHVMYLQKNDYLKVYKNGKLSFCGYYRSAAGLTNSRLYFIIDNQPEDKKKYITLKLEVKKYSVDILGKIGKKEIKCGEPLSSAKVKK

SEQ ID NO: 2631 - protein, 566 aa, unidentified
  REGION 1..566: note = Category: MG81 effectors
  REGION 1..566: note = Description: MG81-920 effector
  source 1..566: note = uncultivated organism sequence
MGWKSKGRGGTLVDNEEKKEDGATCCLTLPLKLEKWQSDHLEKRFEIARQLYNTLVHAELKRIHRIERMPEYREIERLIEATTDKKEKWALKNQKKQFLRKNGINRNTFTTDMKRLYKHFNDNIGSNVAQHGIVSQVLTAFEKVYIENQSGEVHFKKPGDLRSVQGYSQKKSGGVEIMFREGKIIWTQQENDDRKKSPKYQQRKKRQNYKGVKGIAREFPVVFSKNNPYEAEMLTKHVKFVRILRKDGKTKPHWYAQLVLEGRPVTKYDPISGAPKHPVGHGVVGIDIGTRTLAYSNDKEVNLLELADRVQNIEQEKRRLQRKMDRSRRAMNPENYNSDGTFKRGVKLTRNKSKRYRRIQHQLAMIQHHQADIRKQQHNELANYLLTLGDCFFVENMSYCDLVHRANKTEISEKTGRYKRKKRFGKSIANKAPAMLITMLKQKCQSRGLKGVKEVDTHVRASQYNHQTDTCIEKALENRWNVMPDGERIQRDLYSAFLLQHCKQGLPEYNRKELKKEFGEELYRVFDREALQRDYPQFVAYHHMTIQRLSELPHTIPSMGIRRIIS

SEQ ID NO: 2632 - protein, 541 aa, unidentified
  REGION 1..541: note = Category: MG81 effectors
  REGION 1..541: note = Description: MG81-921 effector
  source 1..541: note = uncultivated organism sequence
MVQSTADAEAKSVMYRAYKFRLDPNNEQVKALYQAAGAARYTYNMMTAYNLEIKKNRDEFWYAHITEDSDEQYKKQVESQLKALEKAEPARYKPLCQYASFSTQKLTPAKHKHKEVSEAIAQGVLPNDAWGSEEHPKNPWLHEANQRVLVSGLQNSAKAWKNFWDSQTGRRKGAKVNLPRLKKRGISRDSFTVPAPEAMGGYGAPYKNDSEQYKRLKKKGKDAVIQDYRHVRLSYLGVLRTFNSTKPLAKAVNTGAKIKSYTVSRNADRWYVSFLVELSEPIARPATKKQRAAGGVGIDLGVKTLVTLSDESNPYIANLRPGQRAQRKLRKLQQKFARSQKGSNRRARLAAEIARLHHKVALRRKGYLDQVTKGLVTQYSAVACEDLNVSGMVHSAKGTVENPGKNVAAKSGLNRSILDASFGMFIRQLEYKSAWYGSVVLKVDKWFPSSRTCFNCGEVKSKLPLSERVYDCQYCGYSADRDLNAARNILEQAYKEKEDKQNPQFAPERGENSNGRGRGSTCSVESGETSRPADGSAGHRR

SEQ ID NO: 2633 - protein, 508 aa, unidentified
  REGION 1..508: note = Category: MG81 effectors
  REGION 1..508: note = Description: MG81-922 effector
  source 1..508: note = uncultivated organism sequence
MKRHLDQLLRTKKYRGLRKSYGKISKSIKSLQQIKELSNVQKRHLKDQKKNLQTVSDQMNEMQETYHVTWEYCRNTMKTLRLKYEQTSVIALSRAEDIWTAVSKVLYSDGERLHFKKRGDLPELRAKQFHKEIIGRVKNGFLEFRYGKVSLPVIRKETDLWLMNELEAVESYLKDPDFHDAYAINQMQQGEIVSTYRPCYASIVCKTIRGKLRVYLHLTVEGLPFSKRTNDGIIKHPYGNGPVGCDIGTQTIAYTSDHTVGLENLAERGNSICYVERWQRLVQRAMDRSRRAMNPDNYNDDGTIRKGKKTWIKSKRYQKLQLRYRELCRISAENRRLAIHEQVHKMRSLGDIFVTEAKNAKKLQKRANPENPLDKNGRPKRKKRFGRSIQNRCPGYFQAKVKQLFESTGGTYIEVPSDYRASQYDHTVDDYIKKKLSQRMYNLKDGTKVQRDWYSSFLLYCIDLITKTIDRQKCLATFETQLNKEHAMIEEIIHLKKHIMNSGIRVAV

SEQ ID NO: 2634 - protein, 1323 aa, unidentified
  REGION 1..1323: note = Category: MG81 effectors
  REGION 1..1323: note = Description: MG81-923 effector
  source 1..1323: note = uncultivated organism sequence
MKVSKVDHTSAGVTSKKDITYNGLLYRNPPKKGVNEILKDAETDEKILENMENYITRLNNRASSLYSVFNPIGNEKSKDNKSAEKDLYRNISSCFRDFVQDIKSNSADTASRNLLNRSFRVNSDKETIDNFVARYLRKSLQKRVNGYELSEIIRNIIYLKANLYRKEDVPVKEVCILAEAIKEDITKERQIKKMAVSIVKQDVKIQTYLSDDGKVLLRHTFAKHSKKSALFRFLQKFTSADIEEQEEMIRELRALVVLFYCGPNAYKEAQGDGIGVWTFGKTASDVRVNFCEEACRLITEYQAELERVETEKKEKSSNVKPVNTDIYKEKIKKAIRYSIAGSYQEAARTLKETEGFEDKRLWLGLIEEYAERILLSNRRFMDPGTQNCEFLCKRTMQMLISYIAMKLVDLGKAVYHFAMPAQIDVTNGKPAEFGEVQPSFRDGITSFDYEWIKAEESLTRELSTYSVFAVRNFLNSISKKESDIIAVNLNDVESGNLKSNSVMRVLRYFGGKKEWQDTYIGEVSENELINALRKEIGAARNSTFHYAGTIDNGITDDDKLIISQIYEKEHGDIGRIRRKKYYSNNALMFYKKTDIDALMDYLYSAPKDHPAQIPAFSKILNKNKVYEFSKFIKGNPKKKISTAGKTEELKGCVFYMLKECYYYGFLPDSRSALFVREALEDIVKSAEDAGPAATDRRLEAAQNFKKRFYEISEKASLGQICQRIMTDFQLQNGGQKKVQSSKYAKKGVGEPIYQHFRMMLYDILRKAFWKYLNTLTETGEMNFMFMREPSYKPEFATEEEFCKNWNDHSYDDIREGMEEDSYLEAWFTAAHFIAPAQLNHLIGSFKKYEQFTSDIKFRAEGNGIECNSRWQNRIHQDEMHRLLRVLEFVQMTNGTFSKEISDYYGRDVDSAIEEYAEFVENFVDFSTKKMPNKHVALQTFCNIAVKSGSPNGRIGIYYDGEKPILNRNIVMADMYGNVSLISNCMKKVTEREIKVFYNDMNNLTEVFKRGVCQNEDEQKRLKAFQNNKNRVELLDVAIYTEIVNELYAQLVSWSYLRERDLMYYQLGVNYMKLFNGNSVPKDSFLRIIQGNGANITEGAVLYQLVAMNSFGWPLLCRDGSADKKANTTGQKVDSFFKDYCRKDASIYESCLMLFERLQSHDAIIKEIRNPIDHMYYFEKGKNGATKSILEMYGDIYDRFFDYDLKLKKSVSFVLQNILLDHFIIAHTVMNRQEEKYKYKNKDGQEKSYTGTKLAIRPNREQKKKVFDKTIRKMKEISIIHYGMESDVLTYKIKVDSMPVLVIVDARSRMFLDQMQRILEYSKT

SEQ ID NO: 2635 - protein, 1134 aa, unidentified
  REGION 1..1134: note = Category: MG81 effectors
  REGION 1..1134: note = Description: MG81-924 effector
  source 1..1134: note = uncultivated organism sequence
MKYVIGMDIGIGSIGWSVIRSDADCKRIEDFGVRIFDPGENASDRKSNSQIRREYRSVRRVLRRRKHRKELLKAHLENIGLTTIDRINEYFKHADGDIISLRVKGLDKKLAPEEIAACLINIANRRGYRPFYENEELSQYEKTSLNKTRQFMLSGEYRTSAEMILKNEQFDSEESEYRSYRNRSGNEETVLIERKWLRDEVEKILKKQSEFYPCLNDRNTNAIKRIIFDQRDFEDGPGDKNDPFRRYTGFLESMGQCRFYPDEKRGYRATLTADTYSLVNELSQYSYVDKNGCFVFDSALAHDLIASALKNAKFTKSDFNKICKAHGIVPIYGGKGKDTDISRCFKFLKAIKPILEADGFDWETVCNIDTASDPDSILNRIGIIVSENITPARRKKALKNLNILNDDSITALCNYKFGGTSSVSYKYMSGAIEAFLNGDIYGKHQASHIEETATESVKHTKLPVFDKDFEFFKNPVVFRAINESKKVINAIIEKYGSPSAINIEVGSEVSRSFANRTADKNEQTKRMKEKDAAKKAIAELLGVDIANVTSKMIDRYFLGELQGWKCMYSGKEINKEECLRGSKAYEIDHIVPFSLILDNTLNNKALVLTSENQLKKQQTPLMYLSGERRKNFIGTVNELFRAKKIKKKKYAYLLQPDLNDEKMSEWKSRNLNDMRHISRFMVGYLKENLKFDNSSKLEGRWQNVYAVKGSLTSMFRKLWLNETTWGRADKASIKAETYLDHAVDAVVIGNCLPVYVEIAQVNLRLRDIYKSNGRQFVAEYWDCFNKGVEMISRYYNIDKDTVRAFLKKSDRIPSMIPDLREEVDRRFVDHAIYSKYQKEIADHEGKKFKEPTYEEAEQAYRTSMENLYPTDLQFAHSLSMPLISCKPERKFSGKITADNPVKLREIDGKLYTLSKKEIGKIERKDIEKIYTSDTQLIAYLIELFDGAKDTATLGDIMKEKGISEIRTKNGNAIRKLTLRNICNKDFLKKEIDENNHTYLDTAKYYCVELYKDIKNQLQVQGIKRADIILQNGKLCLAPWYKQPDDYFKHVMYLQKNDYLKVYKNGKLSFCGYYRSAAGLTNSRLYFIIDNQPEDKKKYITLKLEVKKYPVDILGKIGKKEIKCGEPLSSAKVKK

SEQ ID NO: 2636 - protein, 537 aa, unidentified
  REGION 1..537: note = Category: MG81 effectors
  REGION 1..537: note = Description: MG81-925 effector
  source 1..537: note = uncultivated organism sequence
MITDKEHKRHLKQFHKLSDRHILAVETDMSYSDVLKVVALSDKIRKAGNELIGIMRKNYNQLMRTKRYRKLLFLYGNSKDKNKRKTYAKQLNEMQKAYNITWEYCRTSMIPIGKKYGVDAVFALTKAEDIWRGMEKCLYGNGNILHFSRYGELPCIRAKQMNRGIRIFVKDNMLQFKLGRMVFGIQTNDRFQQDEVDAVLSYLAESEILNDRAVNTLIKDDYCIDTYRPCYATLVPKMIRGKYRVYLHLTIEGRAKPKYDRFGNPRHKYGKGMIGADIGTQTVAYTSDTEVGLKNLSERGNSIQTSERKERLLYRAMDRSRRATNPQNYNDDGTVKKGRKTWIYSNHYKKLKEKHSELCRINAINRQLAINEDANHLRSLGDLFITEPKNAGKLMRRAKETTVNCKGKFNRKKRFGKSIKNRCPSGFQAAVEQKFKVSGGIYIEVSNDYRASQYDHTIDEYIKKKLSDRMYKLQDGTEVQRDWYSSFLLYCYDYRTKDIDKNKCISEFDKCYNKEKALIEWIKVNEIKVLNSGIKIA

SEQ ID NO: 2637 - protein, 1138 aa, unidentified
  REGION 1..1138: note = Category: MG81 effectors
  REGION 1..1138: note = Description: MG81-926 effector
  source 1..1138: note = uncultivated organism sequence
MKYVIGMDIGIGSIGWSVIRSDADCKRIEDFGVRIFDPGENASDRKSNSQIRREYRSVRRVLRRRKHRKELLKAHLENIGLTTIDRINEYFKHADGDIISLRVKGLDKKLAPEEIAACLINIANRRGYRPFYENEELSQYEKTSLNKTRQFMLSGEYRTSAEMILKNEQFDSEESEYRSYRNRSGSEETVLIERKWLRDEVEKILKKQSEFYPCLNDRNTNAIKRIIFDQRDFEDGPGDKNDPFRRYTGFLESMGQCRFYPDEKRGYRATLTADTYSLVNELSQYSYVDENGCFVFDSALAHDLIASALKNAKFTKSDFNKICKAHGIVPIYVGKGKDTDISRCFKFLKAIKPILEADGFDWETVCNIDTASDPDSILNRIGIIVSENITPARRKKALKNLNILNDDSITALCNYKFGGTSSVSYKYMSGAIEAFLNGDIYGKHQASHIEETATESVKHTKLPVFDKDFEFFKNPVVFRAINESRKVINAIIEKYGSPSAINIEVGSEVSRSFANRTADKSEQTKRMKEKDAAKKAIAELLGVDIASVTSKMIDRYFLGELQGWKCLYSGKEINKEECLRGSKAYEIDHIVPFSLILDNTLNNKALVLTSENQLKKQQTPLMYLSGERRKNFIGTVNELFRAKKIKKKKYAYLLQPDLNDEKMSEWKSRNLNDMRYISRFMVGYLKENLKFDNSSKSEGRWQNVYAVKGSLTSMFRKLWLNETTWGRADKASIKAETYLDHAVDAVVIGNCLPVYVEIAQVNLRLRDIYKSNGRQFVAEYWDCFNKGVEMISRYYNIDKDTVRAFLKKSDRIPSLIPDLREEVDRRFVDHAIYSKYQKEVADHEGKDFKKPTYEEAEQAYRVSMENLYPTDLQFAHGLSMPLISCKPERKYRGKITADNPVKLREIDSKLYTLSKKEIGKIERKDIEKIYTSDTQLIAYLIELFDGAKDTATLGDIMKEKGISEIRTKNGNAIRKLTLRNICNKDFLKKEIDENNHTYLDTAKYYCVELYKDIKDKLRVQGIKRADIIPQNGKLCLAPWYKQPDGFFKHVMYLQKNDYLKVYENGELLFCGYYLSVEDIRNSKLYFIIDNQPGQNRKENCKSIHIKSEVKKYTVDILGKIGKKEIKCGEPLSSAKVKK

SEQ ID NO: 2638 - protein, 1146 aa, unidentified
  REGION 1..1146: note = Category: MG81 effectors
  REGION 1..1146: note = Description: MG81-927 effector
  source 1..1146: note = uncultivated organism sequence
MKYVIGMDIGIGSIGWSVIRSDADCKRIEDFGVRIFDPGENAGDRKRKSNSQIRREYRSVRRVLRRRKHRKELLKAHLENIGLTTIDRINEYFKHADGDIISLRVKGLDKKLAPEEIAACLINIANRRGYRPFYENEELSQYEKTSLNKTRQFMLSGEYRTSAEMILKNEQFDSEKSEYRSYRNRSGNEETVLIERKWLRDEVEKILKKQSEFYPCLNDRNTNAIKRIIFDQRDFEDGPGDKNDPFRRYTGFLESMGQCRFYPDEKRGYRATLTADTYSLVNELSQYSYVDENGCFVFDSALAHDLIASALKNAKFTKSDFNKICKAHGIVPIYGGKGKDTDISRCFKFLKAIKPILKADGFDWETVCNIDTASDPDSILNRIGIIVSENITPARRKKALKNLNILNDDSITALCNYKFGGTSSVSYKYMSGAIEAFLNGDIYGKHQASHIEETATESIKHTKLPVFDKDFEFFKNPVVFRAINESRKVINAIIEKYGSPSAINIEVGSEVSRSFANRTADKNEQTKRMKEKDAAKKAIAELLGVDIASVTSKMIDRYFLGELQGWKCLYSGKEINKEECLGGSKAYEIDHIVPFSLILDNTLNNKALVLTSENQLKKQQTPLMYLSGERRKNFIGTVNELFRAKKINKKKYAYLLQPDLNDEKMSEWKSRNLNDMRYISRFMVGYLKENLKFDNSSKSEGRWQNVYAVKGSLTSMFRKLWLNETTWGRADKASIKAETYLDHAVDAVVIGNCLPVYVEIAQVNLRLRDIYKSNGRQFVAEYWDCFNKGVEMISRYYNIDKDTIRAFLKKSDRIPSLIPDLREEVDRRFVDHAIYSKYQKEIADHEGKKFKEPTYEEAEQAYRVSMENLYPTDLQFAHGLSMPLISCKPERKYRGEITAANPVKLREIDGKLYTLSKKRIYSAADKDKIKRTDIEKIYTSDANLIAYLIELFDGAKDTATLRDIMKEKGISEIRTKNGNAIRKLTLRNICNKDFLKKEIDENNHTYLDTAKYYCVELYKDIKDKLRVQGIKRADIILQNGKLCLAPWYKQPDGYFKHVMYLQKNDYLKVYENGELLFCGYYLSVEDIGNSKLYFIIDNQPGQNKKENCKSIHIKSEVKKYTVDILGKIGKKEIKCGEPLSSAKVKK

SEQ ID NO: 2639 - protein, 974 aa, unidentified
  REGION 1..974: note = Category: MG81 effectors
  REGION 1..974: note = Description: MG81-928 effector
  source 1..974: note = uncultivated organism sequence
MQVHDDVILGLDIGVGSLGWALLEEDLQTGEQRLLQRQTPQGETTYALGVRLFHVPENAKTKELLNVKRRTARMQRRTTARRAQRMRRVRALLDSLGVPGVRDADAFHLGKGRGAQCDPWQLRREGLERRLEAREWAVVLLHIAKHRGFRSNSKTDRSGSDKEMGQVLQAVSNLQQEVEASGLTVGALLASRERRRNRADHTGAPRYDLCMLRSLQENEVDILFTRQRELGNPLAGEEVRCRYAELAFAQRPLAPVSHMVGPCAFLEGERRAPRFAPTAELFRYVQALCNMRLRQETGEETPLSEEQRQAACAVFGSVQSVTYKKLRQVLRLPAGCRFAGLSYGVTEKGNVQDPEKADVVMRTGKCCQGTACLRGILGDAYEALHEQRLDEADAARLAATGALSAPAAALLARGMAGLRLTDAVARIVSELNDLDQIRAVLALLPLAAPRIAALSQAAGEGKLGIFQGSARLSLRAMEAILPHMLACGEYAAACELAGFDPRAAQKTDVTDIRNPVVLRVFREVRRQFSAICREFGFLPGRVHVELLREVGKSGEERNRISRGLERRTKEKEAARKAVAQLLGKSPETVSAGEVQRYELWRQQDGKCAYYMLWRHAGGERAYGDAMPQGSIPPAWLADGVNAVQVDHILPRSRTFDNSFHNLCLCCHAANQAKGGRTPWEWLGAAQPQAWHDFEQWVQSLPLKGLKKRNYLLRDLNAEVQGRFHARNLTDSGYVARLTLRWLEGEYARHDVPMQDADGRTRRRFFARPGQVTDFLRRHWGVQALKKIDGQRSGDRHHALDALLVAACSEGMLQRMVRAFQREENGPERLHIPCPWQDFSATVGRALGSVFVSRGTRPHQGPPARGDPARHTRGTAARRGDAARAVRAQGRGQADGGRPGQDQGRRPLPGRGGGPAPLAECGQARGCPAPLGTWRHHPACARLRRRVQQRRGAATGIGTGPSQQRRHGAHGHLQP

SEQ ID NO: 2640 - protein, 1098 aa, unidentified
  REGION 1..1098: note = Category: MG81 effectors
  REGION 1..1098: note = Description: MG81-929 effector
  source 1..1098: note = uncultivated organism sequence
MQVRDDVILGLDIGVGSLGWALLEEDLQTGEQRLLQRQAPQGETSYALGVRLFNVPENPKTKELLNVKRRTARMQRRTTARRAQRMRRVRALLDSLGVPGVRDADAFHLGKGRGAQYDPWQLRREGLERRLEAREWAVVLLHIAKHRGFRSNSKTDSSGSDKEMGQVLQAVSNLQQEVEASGLTVGALLASRERRRNRADHTGAPRYDLCMLRSLQEDEVNILFTRQRELGNPLAGEDIRCRYAELAFAQRPLAPVSHMVGPCAFLEGERRAPRFAPTAELFRYVQALCTMRLRQETGEETPLSEEQRQAACAVFGSVQSVTYKKLRQVLRLPAGCRFVGLSYGVTGKGKVQDPEKADVVMRTGKCCQGTACLRGILGDAYDALHEQRLDEADAARLAATDALSAPAAALLARGMAGLRLTDALVRIVSELNDLGQIRAILALLPLPAPRIAALSQAAGEGKLGFFQGTARLSLRAMEAILPHMLACGEYAAACELAGFDPRAAQKTDVTDIRNPVVLRVFREVRRQFSAICREFGFLPGRVHVELLREVGKSGEERNRISRGLERRTKEKEAARKAVAQLLGKSPEAVSAGEVQRYELWRQQDGKCAYYMLWRHAGGERAYGNAMPQGSIPPAWLADGVNAVQVDHILPRSRTFDNSFHNLCLCCHAANQAKGGRTPWEWLGAAQPQAWHDFEQWVQSLPLKGLKKRNYLLRDLSAEVQGRFHARNLTDSSYVARLTLRWLEEEYARHDVPMQDAEGRTRRRFFARPGQVTDFLRRHWGVQALKKIDGQRSGDRHHALDALLVAACSEGMLQRMVRAFQREENGPERLHIPCPWQDFSATVGRALGSVFVSRVERGRTKGPLHEETLRAIREERQPDGETRRVLYERKAVARLTAADLDRIKDAARCPDVVAALRRWLDAGKPGDDLPRSAHGDIIRHVRVRAGEFSSGVILQRGSGQAQAKNGGIVRTDIYSRDGKFYMVPVYAKDVADKRLPLRACVAHKDEKDWLELTEDYHFLFSLTPDCYVLTENRKGEVKEGYFEGPDRGSANISLSLAHDKKNTIRGIGIQNLKRFEKYRVDRFGRLSLVRREADPRGRP

SEQ ID NO: 2641 - protein, 1098 aa, unidentified
  REGION 1..1098: note = Category: MG81 effectors
  REGION 1..1098: note = Description: MG81-930 effector
  source 1..1098: note = uncultivated organism sequence
MQVRDDVILGLDIGVGSLGWALLEEDLQTGEQRLLQRQAPQGETSYALGVRLFNVPENPKTKELLNVKRRTARMQRRTTARRAQRMRRVRALLDSLGVLGVRDADAFHLGKGRGAQCDPWQLRREGLERRLEAREWAVVLLHIAKHRGFRSNSKTDSSGSDKEMGQVLQAVSNLQQEVEASGLTVGALLASRERRRNRADHTGAPRYDLCMLRSLQEDEVNILFTRQRELGNPLAGEDIRCRYAELAFAQRPLAPVSHMVGPCAFLEGERRAPRFAPTAELFRYVQALCTMRLRQETGEETPLSEEQRQAACAVFGSVQSVTYKKLRQVLRLPAGCRFVGLSYGVTEKGKVQDPEKADVVMRTGKCCQGTACLRGILGDAYDALHEQRLDEADAARLAATDALSAPAAALLARGMAGLRLTDALVRIVSELNDLGQIRAILALLPLPAPRIAALSQAAGEGKLGFFQGTARLSLRAMEAILPHMQACGEYAAACELAGFDPRAAQKTDLTDIRNPVVLRVFREVRRQFSAICREFGFLPGRVHVELLREVGKSGEERNRISRGLERRTKEKEAARKAVAQLLGKSPEAVSAGEVQRYELWRQQDGKCAYYMLWRHAGGERAYGNAMPQGSIPPAWLADGVNAVQVDHILPRSRTFDNSFHNLCLCCHAANQAKGGRTPWEWLGAAQPQAWHDFEQWVQSLPLKGLKKRNYLLRDLSAEVQGRFHARNLTDSSYVARLTLRWLEEEYARHDVPMQDAEGRTRRRFFARPGQVTDFLRRHWGVQALKKIDGQRSGDRHHALDALLVAACSEGMLQRMVRAFQREENGPERLHIPCPWQDFSTTVGRALGSVFVSRVERGRTKGPLHEETLRAIREERQPDGETRRVLYERKAVARLTVADLDRIKDAARCPDVVAALRRWLDAGKPGDDLPRSAHGDIIRHVRVRAGEFSSGVILQRGSGQAQAKNGGIVRTDIYSRDGKFYMVPVYAKDVADKRLPLRACVAHKDEKDWLELTEDYHFLFSLTPDCYVLTENRKGEVKEGYFEGPDRGSANISLSLAHDKKNTIRGIGIQNLKRFEKYRVDRFGRLSLVRREADPRGRP

SEQ ID NO: 2642 - protein, 605 aa, unidentified
  REGION 1..605: note = Category: MG81 effectors
  REGION 1..605: note = Description: MG81-931 effector
  source 1..605: note = uncultivated organism sequence
MPDHINVFVDVPQTAAPCDVAGTFKDMSAIELFKAFPQLIQFYAGYCVLWSRGYFVSTVIKIILRSRKMITDKEHKRHLKQFHKFSDRHILAVETDMPYSDVLKVVALSDKIRKAGNELVGLMRKNYDQLMRTKRYRKLLFLYGNTKDKDKRKTYAKQLNEMQKAYNITWEYCRTSMIPIGKKYGVDAVFALTKAEDIWRGMEKCLYGNGNAIHFSKYGELPCIRAKQMNRGIPISVTDNKLHFKLGRMVFGIQTNDRFQQDEVDAVLSYLAESEILDDKAVNTLIKDGCCIDTYRPCYATLVPRMIRGKYRVYLHLTIEGKAKPKYDKHGNPRHKLGKGMIGADIGTQTVAYTSDTKVGLKNLSERGSSIQTSERKERLLYRAMDRSRRATNPQNYNDDGTVKKGRKTWIYSNHYKKLKTKYSELCRINAINRQLAINEDANHLRSLGDVFITEPKNAGKLMRRAKETTVNSKGKFNRKKRFGKSIKNRCPSGFQSAVEQKFKVSGGIYIEVSNDYRASQYDHTIDDYIKKKLSDRMYKLQDGTEVQRDWYSSFLLYCYDYRTKDIDKSKCISEFDKCYNKEKALIEWIKVNEIKVLNSGIKIA

SEQ ID NO: 2643 - protein, 501 aa, unidentified
  REGION 1..501: note = Category: MG81 effectors
  REGION 1..501: note = Description: MG81-932 effector
  source 1..501: note = uncultivated organism sequence
MNEGDGMPKEEKESCCVLQLRLYPEPWQVQIIETRFKVLEHLKNSLIALELRKLRNLERTRAYREIQEQIKLADDKSKIKLYAKRRKLLKDAGFSEFVFKDDITPMQKHFAAHIATHVAHRAASEVWRAFDKFLFGNGKMVHYVRRGTLRSASNQTAGTTMTLENGYFKWNGGRDQNSIAINIRVAKPTTYYEKEMLQKKAKYFRIVRKWGKIGYKYYLQITLAGLPAVKPRLIANEKKVGIDIGPSSIAIVSDKKVELRALADKVQNNHIEKCSLQRSMDRSRRNLNPQNYNEDGTIRRGIRLNWTFSKHYIEMRGKVRMLERKNVDIRKYQHTCLANEVILLGTDVYIEQMSFKGLQRRAKETTYREDGRPKRKKRFGKSIANRAPAMFVEILGRKLTTIVGTELNKVDTFKFRASQYDHTNGSYKKKLLKERWAQLSNGDRIQRDLYSAFLLKNSNADLNSTNVEQCNATYDAFKIMHDDCITKLKSEKKSCLPSFGV

SEQ ID NO: 2644 - protein, 567 aa, unidentified
  REGION 1..567: note = Category: MG81 effectors
  REGION 1..567: note = Description: MG81-933 effector
  source 1..567: note = uncultivated organism sequence
MTKRKKHQITEYEKCLREYHKASPRHVIVLETDLTEDEKRHLFHQADLLRQCGNELLGIMKRHLDQLLRTKKYRGLRKSYGKISKSIKSLQQIKELSNVQKRHLKDQKKNLQTVSDQMNEMQEEYHITWEYCRNTMKTLRLKYEQTSVIALSRAEDIWTAVSKVLYSDGERLHFKKRGDLSELRAKQFHKEIIGRVKNGSLEFRYGKVSLPVIRKETDLWLMDELEAVESYLKDPSFHDAYAIDQMKHGEIVSTYRPCYASIVCKTIRGKLRVYLHLTVEGLPFPKRTKDGVIKHLCGDGIVGCDIGTQTIAYTSDHVVGLENLAERGNSIRCVERQQRLVQRAMDRSRRAMNPDNYNADGTIRKGKKTWIKSKRYQKLQLSYRELCRVSAENRKLAIHEQVHKMRSLGDVFVTEAKNAKKLQKRANPEDPLNKNGKPKRKKRFGRSIQNRCPGYFQAKIQQLFESTGGTYIEVPSDYRASQYDHTVDDYIKKKLSQRMFNLKDGTKVQRDWYSSFLLYCIDLITKTIDRQKCLATFETQLNKEHAMIEEIIRLKKRIMNSGIRVAA

SEQ ID NO: 2645 - protein, 1098 aa, unidentified
  REGION 1..1098: note = Category: MG81 effectors
  REGION 1..1098: note = Description: MG81-934 effector
  source 1..1098: note = uncultivated organism sequence
MQVHDDVILGLDIGVGSLGWALLEEDLQTGEQRLLQRQTPQGETTYALGVRLFHVPENAKTKELLNVKRRTARMQRRTTARRAQRMRRVRALLDSLGVPGVRDADAFHLGKGRGAQCDPWQLRREGLERRLEAREWAVVLLHIAKHRGFRSNSKTDRSGSDKEMGQVLQAVSNLQQEVEASGLTVGALLASRERRRNRADHTGAPRYDLCMLRSLQENEVDILFTRQRELGNPLAGEEVRCRYAELAFAQRPLAPVSHMVGPCAFLEGERRAPRFAPTAELFRYVQALCNMRLRQETGEETPLSEEQRQAACAVFGSVQSVTYKKLRQVLRLPAGCRFAGLSYGVTEKGNVQDPEKADVVMRTGKCCQGTACLRGILGDAYEALHEQRLDEADAARLAATGALSAPAAALLARGMAGLRLTDAVARIVSELNDLDQIRAVLALLPLAAPRIAALSQAAGEGKLGIFQGTARLSLRAMEAILPHMLACGEYAAACELAGFDPRAAQKTDVTDIRNPVVLRVFREVRRQFSAICREFGFLPGRVHVELLREVGKSGEERNRISRGLERRTKEKEAARKAVAQLLGKSPETVSAGEVQRYELWRQQDGKCAYYMLWRHAGGERAYGDAMPQGSIPPAWLADGVNAVQVDHILPRSRTFDNSFHNLCLCCHAANQAKGGRTPWEWLGAAQPQAWHDFEQWVQSLPLKGLKKRNYLLRDLNAEVQGRFHARNLTDSGYVARLTLRWLEEEYARHDVPMQDADGRTRRRFFARPGQVTDFLRRHWGVQALKKIDGQRSGDRHHALDALLVAACSEGMLQRMVRAFQREENGPERLHIPCPWQDFSATVGRALGSVFVSRVERGRTKGPLHEETLRAIREERQPDGETRRVLYERKAVARLTAADLDKIKDAARCPDVVAALRRWLDAGKPGDALPRSAHGDIIRHVRVCAGEFSSGVVLQRGSGQAQASNGGMVRTDIYSRDGKFYMVPVYAKDVADKRLPLRACVAHKDEKDWPEMTADYRFLFSLTPDCYVLTENRKGEIKEGYFSGADRSSANISLTLAHDRKSSIRGIGIQKLRRFEKYRVDRFGRLSPVRREADPRGRS

SEQ ID NO: 2646 - protein, 441 aa, unidentified
  REGION 1..441: note = Category: MG81 effectors
  REGION 1..441: note = Description: MG81-935 effector
  source 1..441: note = uncultivated organism sequence
MDADEYKKLLKKFHKLSDRHILVAETDMSYPDVQKVVNFSGRIRKAGNELVGVMKKNYEQLMRTKKYRKMLQLYGSTEDKNKRKTYAGQLNEMQEQYNVTWDFCRVSMIPIGKKYGIDAIFALAKAEDVWRGVEKCLYGNGRMLHFSRYGDFPCIRAKQINRGVPMSVKNDELKFKLGKLVFGIQVKDRFQTDEVNAVLDYLAQPEVIDNKAVKTLQDEACCISTYRPCYATLVPKFIRGKYRVYLHLVIEGKAKPKYDSSGNPRHKYGRGVVGADIGTQTIAYTSDTETGLKNLSERGNSIQKSERLERLYYRAMDRSRRATNPKNYNADGTIKKGKKKWTYSRHYKKLKAKHAELCCINATNRQLAINEDVNHLRCLGDTFVTEPKNAARLMKRSKDTTVNNKGKINRKKRFGKSVKNRCRAVSRLPWKISSKHPAVHT

SEQ ID NO: 2647 - protein, 1098 aa, unidentified
  REGION 1..1098: note = Category: MG81 effectors
  REGION 1..1098: note = Description: MG81-936 effector
  source 1..1098: note = uncultivated organism sequence
MQVHDDVILGLDIGVGSLGWALLEEDLQTGEQRLLQRQTPQGETTYALGVRLFHVPENAKTKELLNVKRRTARMQRRTTARRAQRMRRVRALLDSLGVPGVRDADAFHLGKGRGAQCDPWQLRREGLERRLEAREWAVVLLHIAKHRGFRSNSKTDRSGSDKEMGQVLQAVSNLQQEVEASGLTVGALLASRERRRNRADHTGAPRYDLCMLRSLQENEVDILFTRQRELGNPLAGEEVRCRYAELAFAQRPLAPVSHMVGPCAFLEGERRAPRFAPTAELFRYVQALCNMRLRQETGEETPLSEEQRQAACAVFGSVQSVTYKKLRQVLRLPAGCRFAGLSYGVTEKGNVQDPEKADVVMRTGKCCQGTACLRGILGDAYEALHEQRLDEADAARLAATGALSAPAAALLARGMAGLRLTDAVARIVSELNDLDQIRAVLALLPLAAPRIAALSQAAGEGKLGIFQGSARLSLRAMEAILPHMLACGEYAAACELAGFDPRAAQKADVTDIRNPVVLRVFREVRRQFSAICREFGFLPGRVHVELLREVGKSGEERNRISRGLERRTKEKEAARKAVAQLLGKSPEAVSAGEVQRYELWRQQDGKCAYYMLWRHAGGERAYGNAMPQGSIPPAWLADGVNAVQVDHILPRSRTFDNSFHNLCLCCHAANQAKGGRTPWEWLGAAQPQAWHDFEQWVQSLPLKGLKKRNYLLRDLSAEVQGRFHARNLTDSSYVARLTLRWLEEEYARHDVPMQDAEGRTRRRFFARPGQVTDFLRRHWGVQALKKIDGQRSGDRHHALDALLVAACSEGMLQRMVRAFQREENGPERLHIPCPWQDFSATVGRALGSVFVSRVERGRTKGPLHEETLRAIREERQPDGETRRVLYERKAVARLTAADLDRIKDAARCPDVVAALRRWLDAGKPGDALPRSAHGDIIRHVRVCAGEFSSGVVLQRGSGQAQASNGGMVRTDIYSRDGKFYMVPVYAKDVADRRLPLRACVAAKAEKDWREMTADYRFLFSLTPDCYVLTENRKGEVKEGYFIGSDRSTAAISLSLAHDRQQSLRGIGITTLKRFEKYRVDRFGRLSSVRREADPRGRS

SEQ ID NO: 2648 - protein, 1098 aa, unidentified
  REGION 1..1098: note = Category: MG81 effectors
  REGION 1..1098: note = Description: MG81-937 effector
  source 1..1098: note = uncultivated organism sequence
MQVRDDVILGLDIGVGSLGWALLEEDLQTGEQRLLQRQTPQGETTYALGVRLFHVPENAKTKELLNVKRRTARMQRRTTARRAQRMRRVRALLDSLGVPGVRDADAFHLGKGRGAQCDPWQLRREGLERRLEAREWAVVLLHIAKHRGFRSNSKTDRSGSDKEMGQVLQAVSNLQQEVEASGLTVGALLASRERRRNRADHTGAPRYDLCMLRSLQENEVDILFTRQRELGNPLAGEEVRCRYAELAFAQRPLAPVSHMVGPCAFLEGERRAPRFAPTAELFRYVQALCNMRLRQETGEETPLSEEQRQAACAVFGSVQSVTYKKLRQVLRLPAGCRFAGLSYGVTEKGNVQDPEKADVVMRTGKCCQGTACLRGILGDAYEALHEQRLDEADAARLAATGALSAPAAALLARGMAGLRLTDAVARIVSELNDLDQIRAVLALLPLAAPRIAALAQAAGEGKLGIFQGSARLSLRAMEAILPHMLACGEYAAACELAGFDPRAAQKTDVTDIRNPVVLRVFREVRRQFSAICREFGFLPGRVHVELLREVGKSGEERNRISRGLERRTKEKEAARKAVAQLLGKSPETVSAGEVQRYELWRQQDGKCAYYMLWRHAGGERAYGDAMPQGSIPPDWLADGVNAVQVDHILPRSRTFDNSFHNLCLCCHAANQAKGGRTPWEWLGAAQPQAWHDFEQWVQSLPLKGLKKRNYLLRDLNAEVQGRFHARNLTDSGYVARLTLRWLEEEYARHDVPMQDADGRTRRRFFARPGQVTDFLRRHWGVQALKKIDGQRSGDRHHALDALLVAACSEGMLQRMVRAFQREENGPERLHIPCPWQDFSATVGRALGSVFVSRVERGRTKGPLHEETLRAIREERQPDGETRRVLYERKAVARLTAADLDKIKDAARCPDVVAALRRWLDAGKPGDDLPRSAHGDIIRHVRVRAGEFSSGVILQRGSGQAQAKNGGIVRTDIYSRDGKFYMVPVYAKDVADKRLPLRACVAHKDEKDWLELTEDYHFLFSLTPDCYVLTENRKGEVKEGYFEGPDRGSANISLSLAHDKKNTIRGIGIQNLKRFEKYRVDRFGRLSLVRREADPRGRS

SEQ ID NO: 2649 - protein, 1098 aa, unidentified
  REGION 1..1098: note = Category: MG81 effectors
  REGION 1..1098: note = Description: MG81-938 effector
  source 1..1098: note = uncultivated organism sequence
MQVHDDVILGLDIGVGSLGWALLEEDLQTGEQRLLQRQTPQGETTYALGVRLFHVPENAKTKELLNVKRRTARMQRRTTARRAQRMRRVRALLDSLGVPGVRDADAFHLGKGRGAQCDPWQLRREGLERRLEAREWAVVLLHIAKHRGFRSNSKTDRSGSDKEMGQVLQAVSNLQQEVEASGLTVGALLASRERRRNRADHTGAPRYDLCMLRSLQENEVDILFTRQRELGNPLAGEEVRCRYAELAFAQRPLAPVSHMVGPCAFLEGERRAPRFAPTAELFRYVQALCNMRLRQETGEETPLSEEQRQAACAVFGSVQSVTYKKLRQVLRLPAGCRFAGLSYGVTEKGNVQDPEKADVVMRTGKCCQGTACLRGILGDAYEALHEQRLDEADAARLAATGALSAPAAALLARGMAGLRLTDAVARIVSELNDLDQIRAVLALLPLAAPRIAALSQAAGEGKLGIFQGSARLSLRAMEAILPHMLACGEYAAACELAGFDPRAAQKTDVTDIRNPVVLRVFREVRRQFSAICREFGFLPGRVHVELLREVGKSGEERNRISRGLERRTKEKEAARKAVAQLLGKSPETVSAGEVQRYELWRQQDGKCAYYMLWRHAGGERAYGDAMPQGSIPPAWLADGVNAVQVDHILPRSRTFDNSFHNLCLCCHAANQAKGGRTPWEWLGAAQPQAWHDFEQWVQSLPLKGLKKRNYLLRDLNAEVQGRFHARNLTDSGYVARLTLRWLEEEYARHDVPMQDADGRTRRRFFARPGQVTDFLRRHWGVQALKKIDGQRSGDRHHALDALLVAACSEGMLQRMVRAFQREENGPERLHIPCPWQDFSATVGRALGSVFVSRVERGRTKGPLHEETLRAIREERQPDGETRRVLYERKAVARLTAADLDKIKDAARCPDVVAALRRWLDAGKPGDALPRSAHGDIIRHVRVCAGEFSSGVVLQRGSGQAQASNGGMVRTDIYSRDGKFYMVPVYAKDVADKRLPLRACVAHKDEKDWPEMTADYRFLFSLTPDCYVLTENRKGEIKEGYFSGADRSSANISLTLAHDRKSSIRGIGIQKLRRFEKYRVDRFGRLSPVRREADPRGRS

SEQ ID NO: 2650 - protein, 1098 aa, unidentified
  REGION 1..1098: note = Category: MG81 effectors
  REGION 1..1098: note = Description: MG81-939 effector
  source 1..1098: note = uncultivated organism sequence
MQVHDDVILGLDIGVGSLGWALLEEDLQTGEQRLLQRQTPQGETTYALGVRLFHVPENAKTKELLNVKRRTARMQRRTTARRAQRMRRVRALLDSLGVPGVRDADAFHLGKGRGAQCDPWQLRREGLERRLEAREWAVVLLHIAKHRGFRSNSKTDRSGSDKEMGQVLQAVSNLQQEVEASGLTVGALLASRERRRNRADHTGAPRYDLCMLRSLQENEVDILFTRQRELGNPLAGEEVRCRYAELAFAQRPLAPVSHMVGPCAFLEGERRAPRFAPTAELFRYVQALCNMRLRQETGEETPLSEEQRQAACAVFGSVQSVTYKKLRQVLRLPAGCRFAGLSYGVTEKGNVQDPEKADVVMRTGKCCQGTACLRGILGDAYEALHEQRLDEADAARLAATGALSAPAAALLARGMAGLRLTDAVARIVSELNDLDQIRAVLALLPLAAPRIAALSQAAGEGKLGIFQGSARLSLRAMEAILPHMLACGEYAAACELAGFDPRAAQKTDVTDIRNPVVLRVFREVRRQLSAICREFGFLPGRVHVELLREVGKSGEERNRISRGLERRTKEKEAARKAVAQLLGKSPETVSAGEVQRYELWRQQDGKCAYYMLWRHAGGERAYGDAMPQGSIPPAWLADGVNAVQVDHILPRSRTFDNSFHNLCLCCHAANQAKGGRTPWEWLGAAQPQAWHDFEQWVQSLPLKGLKKRNYLLRDLNAEVQGRFHARNLTDSGYVARLTLRWLEEEYARHDVPMQDADGRTRRRFFARPGQVTDFLRRHWGVQALKKIDGQRSGDRHHALDALLVAACSEGMLQRMVRAFQREENGPERLHIPCPWQDFSATVGRALGSVFVSRVERGRTKGPLHEETLRAIREERQPDGETRRVLYERKAVARLTAADLDKIKDAARCPDVVAALRRWLDAGKPGDALPRSAHGDIIRHVRVCAGEFSSGVVLQRGSGQAQASNGGMVRTDIYSRDGKFYMVPVYAKDVADKRLPLRACVAHKDEKDWPEMTADYRFLFSLTPDCYVLTENRKGEIKEGYFSGADRSSANISLTLAHDRKSSIRGIGIQKLRRFEKYRVDRFGRLSPVRREADPRGRS

SEQ ID NO: 2651 - protein, 1132 aa, unidentified
  REGION 1..1132: note = Category: MG81 effectors
  REGION 1..1132: note = Description: MG81-940 effector
  source 1..1132: note = uncultivated organism sequence
MKYVIGMDIGIGSIGWSVIRSDADCKRIEDFGVRIFDPGENASDRKSNSQIRREYRSVRRVLRRRKHRKELLKAHLENIGLTTIDRINEYFKHADGDIISLRVKGLDKKLAPEEIAACLINIANRRGYRPFYENEELSQYEKTSLNKTRQFMLSGEYRTSAEMILKNEQFDSEESEYRSYRNRSGNEETVLIERKWLRDEVEKILKKQSEFYPCLNDRNTNAIKRIIFDQRDFEDGPGDKNDPFRRYTGFLESMGQCRFYPDEKRGYRATLTADTYSLVNELSQYSYVDENGCFVFDSALAHDLIASALKNAKFTKSDFNKICKAHGIVPIYGGKGKDTDISRCFKFLKTIKPILEADGFDWETVCNIDTASDPDSILNRIGIIVSENITPARRKKALKNLNILNDDSITALCNYKFGGTSSVSYKYMSGAIEAFLNGDIYGKHQASHIEETATESVKHTKLPVFDKDFEFFKNPVVFRAINESRKVINAIIEKYGSPSAINIEVGSEVSRSFANRTADKNEQTKRMKEKDAAKKAIAELLGVDIASVTSKMIDRYFLGELQGWKCLYSGKEINKEECLGGSKAYEIDHIVPFSLILDNTLNNKALVLTSENQLKKQRTPLMYLSGERRKNFIGTVNELFRAKKKKKYAYLLQPDLNDEKMSEWKSRNLNDMRYISRFMVGYLKENLKFDNSSKSEGRWQNVYAVKGSLTSMFRKLWLNETTWGRADKASIKAETYLDHAVDAVVIGNCLPVYVEIAQVNLRLRDIYKSNGRQFVAEYWDCFNKGVEMISRYYNIDKDTVRAFLKKSDRIPSLIPDLREEVDRRFVDHAIYSKYQKEIADHEGKDFEKPTYEEAEQAYRVSMENLYPTDLQFAHGLSMPLISCKPERKYRGEITAANPVKLREIDGKLYTLSKKEIGKIERKDIEKIYTSDTQLIAYLIELFDGAKDTATLGDIMKEKGISEIRTKNGNAIRKLTLRNICNKDFLKKEIDENNHTYLDTAKYYCVELYKDIKNQLQVQGIKRADIILQNGKLCLAPWYKQPDDYFKHVMYLQKNDYLKVYKNGKLSFCGYYRSAAGLTNSRLYFIIDNQPEDKKKYITLKLEVKKYSVDILGKIGKKEIKCGEPLSSAKVKK

SEQ ID NO: 2652 - protein, 512 aa, unidentified
  REGION 1..512: note = Category: MG81 effectors
  REGION 1..512: note = Description: MG81-941 effector
  source 1..512: note = uncultivated organism sequence
MPTKQKEDSNRCVLTLPLLTEPWQEHIIEKRFKIIEHLKNQLISIELRKLKKLQRTKAYKNLIKQIESVPKSERTALYKERNKMLKDAGFSQYTFMDDMAGKKSLMQKHFESHINVQIAHKAAIDVWSSFEKFLFGTGQIVHYQKRGTLSSVASKSPKTGMFYYSDENIFKWSGGGTKPKGGIILCLRVASVKTNYEKEMVANNEIKYYRVVRKWMKTKYKYYLQITFAGKPADKHREISTGRVGIDIGTQTIAIASDKSVKLLELADKVNKNHIKKCELQRKLDRSRRYTNPDNFNPDGTVKRGTKGHKLKWNKSKHYIEIAGKIRELERKNADIRKYQHTCLANDILAMGNQIYIEPMNYKGLQKRAKETQVDEKGRYKKKKRFGKSLANKAPAMFVTILKTKAEQHGGEVYEVDIMSYQASQCDHTTGEYTKHGLNDRWRILGNGDKVQRDLYSAFLIKNSNKTHDEIDLDKCSKTYDNFKKLHDKEIENIRNEVILRKRRNISSYGIA

SEQ ID NO: 2653 - protein, 512 aa, unidentified
  REGION 1..512: note = Category: MG81 effectors
  REGION 1..512: note = Description: MG81-942 effector
  source 1..512: note = uncultivated organism sequence
MPTKQKEGGNRCVLTLPLLTEPWQEHIIEKRFKIIEHLKNQLISIELRKLKNLQRTKAYKNLIKQIESVPKSERTALYKERNKMLKDAGFSQYTFMDDMAGKKSLMQKHFESHINVQIAHKAAIDVWSSFEKFLFGTGQIVHYQKRGTLSSVASKSPKTGMFYYSDENIFKWSGGGTKPKGGIILCLRVASVKTNYEKEMVANNEIKYYRVVRKWMKTKYKYYLQITFAGKPADKHREISTGRVGIDIGTQTIAIASDKSVKLLELADKVNKNHIKKCELQRKLDRSRRYTNPDNFNPDGTVKRGTKGHKLKWNKSKHYLEIAGKIRELERKNADIRKYQHTCLANDILAMGNQIYIEPMNYKGLQKRVKETQVDEKGRYKKKKRFGKSLANKAPAMFVTILKTKVEQHGGEVYEVDIMSYRASQCDHTTGEYTKHGLNDRWRILGNGDKVQRDLYSAFLIKNSNKTHDEIDLDKCSKTYDNFKKLHDKEIENIRNEVKLRERRNISSYGIA

SEQ ID NO: 2654 - protein, 512 aa, unidentified; identical to SEQ ID NO: 1750
  REGION 1..512: note = Category: MG81 effectors
  REGION 1..512: note = Description: MG81-943 effector
  source 1..512: note = uncultivated organism sequence

SEQ ID NO: 2655 - protein, 622 aa, unidentified
  REGION 1..622: note = Category: MG82 effectors
  REGION 1..622: note = Description: MG82-1 effector
  source 1..622: note = uncultivated organism sequence
MAVVVHVYGVPPVLHGERVRLPAEVDEQLSLAHCLREDLVTLEHQRQDAVTAVWSSYPQIAAIETQLTAAETELTDRSAAAAAERSAARKKGPTESSEAVRQLKARIKDLRSQRRTAIADAHPTATPRLTAIADAHRAAIKALYADYSQGRGLYWATYNDVVAHHQVATKRVAAERKAGRPANIRHHRYDGSGSITVQLQRQTGAPPRLPATIADEQNGPWRNVLYLTPWVDPDTWATLARAEQRRRRLGVVRLDLGNKRHLSIPVLVHRMLPADADITSARLVVRRVAGHRKIELHVTARIKDPVTRSGGPAVALHLGWRREDGGAVRVATWRSTAPVHVPDDLNDLVHADTDHTGTISLPARWWHRVSTQPEMAARRATSLNDIRDQLVAALTDNPLTITADDEDAQPVPTAAAVATWRSPARFAHLARTWATDCPAGHQATAAALENWRRSDRRLWEQQAHGTANTLAARADAYRRTMSWLLTGASRLVLDNTAIADLARRADPATEPTLPTAVTDRVAHQRIGASPGQLRSIATTTANSYGVAVAVMPHTGITRTHYRCGHLNPADDRYSAARIVTCDGCGQHYDQESSATLMLLAASGDVAAPGSATARNPDTSAHA

SEQ ID NO: 2656 - protein, 629 aa, unidentified
  REGION 1..629: note = Category: MG82 effectors
  REGION 1..629: note = Description: MG82-2 effector
  source 1..629: note = uncultivated organism sequence
MSAAPQERRSARGPDVPQRRASTDPTILVAGEADASPEDSVTVHTMGVHYRWELPKVVRAQLRLAHDLREDLVTLQLDYEQDVRAIWSSYPDVAAAESELQRADDAVAAVNEHISAERVRLRSKKVGADLTKQLAAARAAVKAARQARRDAIAAVRDAAAQRLRARAAALLAGQKLLYRRYCQDNDLYWASYNDVFRHHKTALQRIRRQRLEGKPATLRHHRFDGTGTITVQLQRTAAMPARSPLLLSDPQGRYRNFLVLPWIDPDYWASLTRAQQRAAGRVVVRMRAGTVDGQPQWIDIPVQAHRWLPADAEILNARLTIDRVAARLSTRLNITARIGAPAAADGLAVAVHLGWRDSDRGTRVATWRSTQPLDVADELSDVMLTDDGLTGSIVLPPTISRRLERHAVTAAARAQSFNAVRDKLVSWLDEHGPMAYRDSDISAAEVRRWRSPARLAAVAIAWRDDHTRGEIVAVLEQWRSADRKIWDGQEHGRRRALGYRNDLYRQVGALLASQAARVVVDDINIAAIAGSRRARNDAPAGLQQLIDRRRFHAAPSRLRTAITAAAHRGGLRVDVVAAKGLSRVHAQCGHENPADDRYVSPPVTCEGCGMAYDPNESATLLMLRAVDAL

SEQ ID NO: 2657 - protein, 610 aa, unidentified
  REGION 1..610: note = Category: MG82 effectors
  REGION 1..610: note = Description: MG82-3 effector
  source 1..610: note = uncultivated organism sequence
MWCVVRVDRLRVTPGNAGFRLLGHARGTPGPSGSARRPGSVGPPVAGAMTAAETVVGAVTVHTMGVHYRWLLPEVLRAQLRLSHSLREDLVTLQLAYEADLRDIWSSYPLVTAAETVLRQAEQAAASATEQVKSERIRLRSKTVSAELTARLSEARDAVTAARQTRRDAIASVKDAAAHRRRDRTALLRADQKQLYRHYCQDDDLYWGTYNDVVHNHRTAVARIQRRRLDGKPAVLRHHRFDGTGTITVQLQRSAAMPPRRPELLCDPAGRYHNHLVLPWIDPRRWTEMSRSEQRRAGRVSVRMRAGSLDGQPQWIDIPVQAHRWLPADAEILTAKLAVTRVAARLSARLIITARIQPPATTPDGPTVAIRLGWRDSVHGTRVASWRSTQPLAIPGRLAHVIAADDRGLTGIITVPQSISQRLERHATTAAARDTALNAIRDKLTSWLHEHGPLPYRDGHLSADEVRRWRSPRPIRGLGHRLARRSPARRHRRRPRGVARRRPQTMGWARTRPPPSAGTPRRSLPPGRRPAHRTGRPGGGRRHQHLRHCPLAPRPRRRGGKSAAGHRPPPLSGRAGQTPRRHRRCGPAHQHSARGHLGQGAVANPCRLWP

SEQ ID NO: 2658 - protein, 390 aa, unidentified
  REGION 1..390: note = Category: MG83 effectors
  REGION 1..390: note = Description: MG83-1 effector
  source 1..390: note = uncultivated organism sequence
MARSRTYKFLLQPTSQQLAAFECLLRLQRELYNAALEERRGTWKWNQRSVSYFDQTKELTQLRSVRPDILSFGVTVCRGTLMRLDRAFNGFFRRCKSGESPGFPRFKGPGSFVSLQWLDTNGWALDETAGRLRLYGIGNVKAHLHRPIKGTPKTITIRREGRRYWVSIQCVDVPAEPLPATGKSIGIDLGVDFLVATSDGQLIQAPRFGKRGHAGLEKAQRDLATKIPGSKNREKAKQRVATHHRKIANRRRDFAHQTSRRLVNDHDLIVYEDLKITNMTRRPKARPDKQGGYEPNGAKAKTGLNRSIHDAGWGQFTAMTIYKAESAGREVIAVDPRNTSRTCSGCGHASAGNRHGAVFRCLGCGREANADINAAENILRAGRARQLIAA

SEQ ID NO: 2659 - protein, 583 aa, unidentified
  REGION 1..583: note = Category: MG83 effectors
  REGION 1..583: note = Description: MG83-2 effector
  source 1..583: note = uncultivated organism sequence
MKVVEFKLQLTDDQASKVDTWLNQLRWVWNEALRRVNEERQRYYRKQVNEDGTFGKVEDTGEVWQVWYNKEIKEKAYCCHIADKTRYADYAPCCEIRPYRHQQYANLKELKKWARNAATQKCNPDKPWLKDIPSCFSDFVARDLIKAWEQALSKTNPARYPRFKGNRDTLRSLTDENGHDHLRKDIRGKRNWLVKLNNKLGFMRIIGKHDRFPKDFTVVRICKRASGYYLQVTSKDLEDKTLKRNDRPVGIDVGLKFIVATDQGRVVEPKRYARVAERRLRLLQRKAARRRDAVQKLEGCKGKNLEKVNQQIALLHENIKYRRRQFNHKLSTKLVREYGAIAVEKLQLKNLMRRPEPKLKENGTGYARNNAAAKSGLNKSFADAGLGQLLEMLKTKAEAAGRLFKEVDPSYTSQECSNCHEQVKKSLSTRTHVCPSCGFVEDRDVNAAKNILEKANFSSDYRCWDKREVKPASASSVEGQQESDSGSLDLGKELRAEDALRLTQSQKNNDHLLVEVNSPSKEAVIPTGSGLDEVRLLQQMHVNSETSTPLASEAVIDQVKASTPKPKPRKVKRCLQNQPEAPT

SEQ ID NO: 2660 - protein, 427 aa, unidentified
  REGION 1..427: note = Category: MG84 effectors
  REGION 1..427: note = Description: MG84-1 effector
  source 1..427: note = uncultivated organism sequence
MNNKVSRYQLLFADEHNELKFKQFNEVMFQLQREMVQIANREVQILWEDMNWSNAVKAKTGVYPTKDEVLERYGSSVRTYIYRTIPQKYNNTSNTSTVLQNVNKRFTQNKKEVMQGKRSIDSYKSTLPIAIHGNSIKIEKIGNKYLVSLSLLSNGYKKQLGIKKGQIIFELMFGRSWSSRQIIDSILSGEFSHTASSITYKNRKWFLNLGYSYPEKEPIKFIDGRTMGIDLGIVKPLVIAFNDNPAHFEVDSDEISEFRKEIHSRRSSLGRQTKHCAESKIGHGVHKRTEGCEKLAQKEANFRDRINHQYSRYVVDLAQKYKCKTIQMEDLTGISKDSTFLKSWPYFDLQTKIEYKAKENGIDVIKINPKFTSQRCSKCGYISEANRPEQAIFQCKKCGFGINADWNAALNISIPGIEKIIKDSEVE

SEQ ID NO: 2661 - protein, 427 aa, unidentified
  REGION 1..427: note = Category: MG84 effectors
  REGION 1..427: note = Description: MG84-2 effector
  source 1..427: note = uncultivated organism sequence
MNNKVSRYQLLFDDEHNELKFKQFNEVMFQLQREMVQIANREVQILWEDMNWSNAVKAQTGAYPTKDGVLKHYGCPVRTYIYRTIPQEYNNTSNTSTVLQNVNKRFVQNKKEVMQGKRSIDSYKSTFPIAIHGNSIKIEKSGNKYIISLSLLSNGYKKQLGIKKGQITFELMFGRSWSSRQIIDSILSGEFSHTASSVIYKNRKWFLNLGYSFPEKEPIKFIDGRTMGIDLGIVKPLVIAFNDNPAHFEVDSDEISEFRKEIHSRRSSLGRQTKHCAESKIGHGVHKRTESCEKLAQKEANFRDRVNHQYSRYVVNLALKYKCKTIQMEDLTGISKDSTFLKSWPYFDLQTKIEYKAKENGIDVIKINPKFTSQRCSKCGYISEANRPEQAIFQCKKCGFGINADWNAALNISIPGIEKIIKDSEVE

SEQ ID NO: 2662 - protein, 427 aa, unidentified
  REGION 1..427: note = Category: MG84 effectors
  REGION 1..427: note = Description: MG84-3 effector
  source 1..427: note = uncultivated organism sequence
MNTKVSRYQLLFNDERNELKFKQFNEVMFQLQREMVQVANKATQILWEDMNWSNDVKVQTGSYPTKEEVTGRYGCSVRNFIYRTVPYEYNNTGNIATILQSVNKRFSQNKKEVIQGKRSIDSYKSTLPIAIHGNSIKIEKSGNKYLISLSLLSNGYRKQLGIKKGQIVFELMFGKSWSSKQIIDSIISGEFSHTASSIVYKNRKWFLNLGYSSPDKDSIKFIEGRTMGIDLGIVKPVVMAFNDNPVHFEIDSNEISEFRKQMIARRASIGKQTKYCADSKIGHGVHKRIEGIEKLKQTESNFRDRINHQYSRYIVDIAVKYKCKTIQMEDLSGISKDSTFLKSWPYFDLQTKIEYKAKENGIDVIKINPKFTSQRCSKCGYISEDNRPEQSVFLCKKCGFGLNADWNAALNIATPNIEEIIKNSDTE

SEQ ID NO: 2663 - protein, 431 aa, unidentified
  REGION 1..431: note = Category: MG84 effectors
  REGION 1..431: note = Description: MG84-4 effector
  source 1..431: note = uncultivated organism sequence
MNTTKVSRYQLLFDDEHNELSFQQANEVLFQLQREMMQIANRTVQLYWEFSGYQSDYKKRFDAYPDKEQLLEDLKYSNLRSYAYAVIAKEFYKNNTGNVATLLQNVDKRYKQNQKDVRLGKHSIDSYKATIPISLHRKSIQISKSKEDYDIRISLLSNVYRKELGVKSGQIYFKLITGKSYSSKQILESILSGKFHYTASSISYRKGKWFLNLGYNFESEELELRPSRVMGIDLGVVKPLVIAYNDTPVHQEIDSNEIQAFRDQMLARRRALGRQTKHCAESNIGHGVKTRTKALEKLKQTEANFRDRINHQYSRYVVDLAVKYKCKTIQMEDLSGISKDDIFLKNWPYYDLQTKIEYKAKEKGIDVVKINPKFTSQRCSKCGYISPENRPDQATFRCKNCGFSLNADWNAALNIAQPGIEEIIRETIKQK

SEQ ID NO: 2664 - protein, 431 aa, unidentified
  REGION 1..431: note = Category: MG84 effectors
  REGION 1..431: note = Description: MG84-5 effector
  source 1..431: note = uncultivated organism sequence
MNTTKVSRYQLLFDDEHNELSFQQANEVLFQLQREMMQIANRTVQLYWEFSGYQSDYKKRFDAYPDKEQLLEDLKYSNLRSYAYAVIAKEFYKNNTGNVATLLQNVDKRYKQNQKDVRLGKHSIDSYKTTIPISLHRKSIQISKSKEDYDIRISLLSNVYRKELGVKSGQIYFKLITGKSYSSKQILESILSGKFHYTASSISYRKGKWFLNLGYNFESEELELRPSRVMGIDLGVVKPLVIAYNDTPVHQEIDSNEIQAFRDQMLARRRALGRQTKHCAESNIGHGVKTRTKALEKLKQTEANFRDRINHQYSRYVVDLAVKYKCKTIQMEDLSGISKDDIFLKNWPYYDLQTKIEYKAKEKGIDVVKINPKFTSQRCSKCGYISPENRPDQATFQCKKCGFSLNADWNAARNIAQPGIEEIIRETIKQK

SEQ ID NO: 2665 - protein, 431 aa, unidentified
  REGION 1..431: note = Category: MG84 effectors
  REGION 1..431: note = Description: MG84-6 effector
  source 1..431: note = uncultivated organism sequence
MNTTKVSRYQLLFDDEHNELSFQQANEVLFQLQREMMQIANRTVQLYWEFSGYQSDYKKRFDAYPDKEQLLEDLKYSNLRSYTYAVIAKEFYKNNTGNVATLLQNVDKRYKQNQKDVRLGKRSIDSYKATIPISLHRKSIQISKSKEDYDIRISLLSNVYRKELGVKSGLIYFKLITGKSYSSKQILESILSGKFHYTASSISYRKGKWFLNLGYNFESEEPELRPSRVMGIDLGVVKPLVIAYNDTPVHQEIDSNEIQAFRDQMLARRRALGRQTKHCAESNIGHGVKTRTKALEKLKQTEANFRDRINHQYSRYVVDLAVKYKCKTIQMEDLSGISKDDIFLKNWPYYDLQTKIEYKAKEKGIDVVKINPKFTSQRCSKCGYISPENRPDQATFQCKKCGFSLNADWNAARNIAQPGIEEIIRETIKQK

SEQ ID NO: 2666 - protein, 431 aa, unidentified
  REGION 1..431: note = Category: MG84 effectors
  REGION 1..431: note = Description: MG84-7 effector
  source 1..431: note = uncultivated organism sequence
MNTTKVSRYQLLFDDEHNELSFQQANEVLFQLQREMMQIANRTVQLYWEFSGYQSDYKKRFDAYPDKEQLLEDLKYSNLRSYTYAVIAKEFYKNNTGNVSLLQQNVDKRYKQNRKDVQMGKRSIDSYKATIPIALQRKSILISKEGANFCVRISLLSNAYRKELGVKNGTLSFKLLFGKSYSAEQILEDIFAGKFKHTSSSISYRKGKWFLNLGYNFESEEPELRPSRVMGIDLGVVKPLVIAYNDTPVHQEIDSNEIQAFRNQMLARRRALGRQTKHCAESNIGHGVKTRTKALEKLKQTEANFRDRINHQYSRYVVDLAVKYKCKTIQMEDLSGISKDDIFLKNWPYYDLQTKIEYKAKEKGIDVVKINPKFTSQRCSKCGYISPENRPDQATFRCKKCSFTLNADWNAALNIAQPGIEEIIRETIKQK

SEQ ID NO: 2667 - protein, 431 aa, unidentified
  REGION 1..431: note = Category: MG84 effectors
  REGION 1..431: note = Description: MG84-8 effector
  source 1..431: note = uncultivated organism sequence
MNTTKVSRYQLLFDDEHNELSFQQANEVLFQLQREMMQIANRTVQLYWEFSGYQSDYKKRFDAYPDKEQLLEDLKYSNLRSYTYAVIAKEFYKNNTGNVSLLQQNVDKRYKQNRKDVQMGKRSIDSYKATIPIALQRKSILISKEGANFCVRISLLSNAYRKELGVKNGTLSFKLLFGKSYSAEQILEDIFAGKFKHTSSSISYRKGKWFLNLGYNFESEEPELRPSRVMGIDLGVVKPLVIAYNDTPVHQEIDSNEIQAFRNQMLARRRALGRQTKHCAESNIGHGVKTRTKALEKLKQTEANFRDRINHQYSRYVVDLAVKYKCKTIQMEDLSGISKDDIFLKNWPYYDLQTKIEYKAKEKGIDVVKINPKFTSQRCSKCGYISPENRPDQATFRCKKCSFTLNADWNAARNIAQPGIEEIIRETIKQK

SEQ ID NO: 2668 - protein, 431 aa, unidentified
  REGION 1..431: note = Category: MG84 effectors
  REGION 1..431: note = Description: MG84-9 effector
  source 1..431: note = uncultivated organism sequence
MNTTKVSRYQLLFDDEHNELSFRQANEVLFQLQREMMQIANRTVQLYWEFSGYQSDYKKRFDVYPDKEQLLEDLKYSNLRSYTYAVIAKEFYKNNTGNVSLLQQNVDKRYKQNRKDVQMGKRSIDSYKATVPIALQRKSILISKEGANFCVRISLLSNAYRKELGVKNGTLSFKLLFGKSYSAEQILEDIFAGKFKHTSSSISYRKGKWFLNLGYNFESEEPELRPSRVMGIDLGVVKPLVIAYNDTPVHQEIDSNEIQAFRNQMLARRRALGRQTKHCAESNIGHGVKTRTKALEKLKQTEANFRDRINHQYSRYVVDLAVKYKCKTIQMEDLSGISKDDIFLKNWPYYDLQTKIEYKAKEKGIDVVKINPKFTSQRCSKCGYISPENRPDQATFRCKKCSFTLNADWNAALNIAQPGIEEIIRETIKQK

SEQ ID NO: 2669 - protein, 431 aa, unidentified
  REGION 1..431: note = Category: MG84 effectors
  REGION 1..431: note = Description: MG84-10 effector
  source 1..431: note = uncultivated organism sequence
MNTTKVSRYQLLFDDEHNELSFRQANEVLFQLQREMMQIANRTVQLYWEFSGYQSDYKKRFDVYPDKEQLLEDLKYSNLRSYTYAVIAKEFYKNNTGNVSLLQQNVDKRYKQNRKDVQMGKRSIDSYKATVPIALQRKSILISKEGANFCVRISLLSNAYRKELGVKNGTLSFKLLFGKSYSAEQILEDIFAGKFKHTSSSISYRKGKWFLNLGYNFESEEPELRPSRVMGIDLGVVKPLVIAYNDTPVHQEIDSNEIQAFRNQMLARRRALGRQTKHCAESNIGHGVKTRTKALEKLKQTEANFRDRINHQYSRYVVDLAVKYKCKTIQMEDLSGISKDDIFLKNWPYYDLQTKIEYKAKEKGIDVVKINPKFTSQRCSKCGYISPENRPDQATFRCKKCSFTLNADWNAARNIAQPGIEEIIRETIKQK

SEQ ID NO: 2670 - protein, 438 aa, unidentified
  REGION 1..438: note = Category: MG84 effectors
  REGION 1..438: note = Description: MG84-11 effector
  source 1..438: note = uncultivated organism sequence
MNTTKVSRYQLLFDDENNELTFKQSNEVLFQLQKEMMQMANRMVQLYWEFSGYQSDYKKQFDAYPDKEKLLEDLKYSNIRSYIYDVLSKEFNKNNTGNVATLQQLVDKRYKQNRKEVQQGKRSIDSYKATIPISLHKGSIRLLKENGDYYAWLSLLSNEYKKELGIKKGRMRFKLLMGKSYSSMQILDSILSGEFHHTSSSLGYRNGKWFLSLGYQFEAKEPKLRESRVMGIDLGVVKPLVIAYNDMPLHHEIDSNEIQVFRDQMHARRRALGRQTKYCAESNIGHGVKTRTKALEKLKQAEANFRDRINHQYSRYVVNLAVKYGCKTIQMEDLTGISKKDTFLKNWPYYDLQTKIEYKARENGIDVVKINPRFTSQRCSKCGFISPENRPDQATFQCKKCGFGINADRNAATNIAQPGIEKIIQETIKQMSAKGKSS

SEQ ID NO: 2671 - protein, 438 aa, unidentified
  REGION 1..438: note = Category: MG84 effectors
  REGION 1..438: note = Description: MG84-12 effector
  source 1..438: note = uncultivated organism sequence
MNTTKVSRYQLLFDDENNELTFKQSNEVLFQLQKEMMQMANRMVQLYWEFSGYQSDYKKQFDAYPDKEKLLEDLKYSNIRSYIYDVLSKEFNKNNTGNVATLQQLVDKRYKQNRKEVQQGKRSIDSYKATIPISLHKGSIRLLKENGDYYVWLSLLSNEYKKELGIKKGRMRFKLLMGKSYSSMQILDSILSGEFHHTSSSLGYRNGKWFLNLGYQFEAKEPKLRESRVMGIDLGVVKPLVIAYNDMPLHHEIDSNEIQVFRDQMHARRRALGRQTKYCAESNIGHGVKTRTKALEKLKQAEANFRDRINHQYSRYVVNLAVKYGCKTIQMEDLTGISKEDTFLKNWPYYDLQTKIEYKARENGIDVVKINPRFTSQRCSKCGFISPENRPDQETVRCKKCGFGINADWNAATNIAQPGIEKIIQETIKQMSAKGKSS

SEQ ID NO: 2672 - protein, 438 aa, unidentified
  REGION 1..438: note = Category: MG84 effectors
  REGION 1..438: note = Description: MG84-13 effector
  source 1..438: note = uncultivated organism sequence
MNTTKVSRYQLLFDDENNELTFKQSNEVLFQLQKEMMQMANRMVQLYWEFSGYQSDYKKQFDAYPDKEKLLEDLKYSNIRSYVYDVLSKEFNKNNTANVSALQQLVDKRYKQNRKEVQQGKRSIDSYKATIPISLHKGSIRLLKENGDYYIWLSLLSNEYKKELGIKIGRMRFKLLMGESYSSMQILDSILSGEFHHTSSSLGYRDGKWSLNLGYQFEAKEPKLRESRVMGIDLGVVKPLVIAYNDMPPHHEIDSNEIQAFRDQMHARRRALGRQTKYCAESNIGHGVKTRTKALEKLKQAEANFRDRINHQYSRYVVNLAVKYGCKTIQMEDLTGISKKDTFLKNWPYYDLQTKIEYKARENGIDVVKINPRFTSQRCSKCGFISPENRPDQATFQCKKCGFGINADRNAATNIAQPGIEKIIQETIKQMSAKGKSS

SEQ ID NO: 2673 - protein, 438 aa, unidentified
  REGION 1..438: note = Category: MG84 effectors
  REGION 1..438: note = Description: MG84-14 effector
  source 1..438: note = uncultivated organism sequence
MNTTKVSRYQLLFDDENNELTFKQSNEVLFQLQKEMMQMANRMVQLYWEFSGYQSDYKKQFDAYPDKEKLLEDLKYSNIRSYVYDVLSKEFNKNNTGNVSALQQLVDKRYKQNWKEVQQGKRSLDSYKATIPISLHRKNIQLLKENGDYYVWLSLLSNEYKKELGIKKGRMRFKLLMGESYSSMQILDSILSGEFHHTSSSLGYRNGKWFLNLGYQFEAKEPKLRESRVMGIDLGVVKPLVIAYNDMPLHHEIDSNEIQVFRDQMHARRRALGRQTKYCAESNIGHGVKTRTKALEKLKQAEANFRDRINHQYSRYVVNLAVKYGCKTIQMEDLTGISKEDTFLKNWPYYDLQTKIEYKARENGIDVVKINPRFTSQRCSKCGFISPENRPDQETFQCKKCGFGINADWNAATNIAQPGIEKIIQETIKQMSAKGKSS

SEQ ID NO: 2674 - protein, 437 aa, unidentified
  REGION 1..437: note = Category: MG84 effectors
  REGION 1..437: note = Description: MG84-15 effector
  source 1..437: note = uncultivated organism sequence
MSNILSMPVKVMRYQIVKPVDADWELLGKVLRDLQDDTRKVLNKVIQLCWEWQGFSAEYKQQYGIYPKTSDFSHYKNIDGYCYKKISDFFTRLHTGNLSMTIKRGVQRWKTDLAEVIKGSKSIASFRSNCPIDIHNKSINIFNVEKEYYAKLSLLSKTYKKELSRDLGQITVLINPGDKSGKDILDRCISGEYKISSSQILQKKDTNTSKNNKWLLNLSYSFKSQKKIVDSNKVLGIDMGIIFPVYMAIHGTLIRDKIDGGEIEHFRKEVENRKIKLQRQGKYCGQGRIGHGTKTRVRPIEFAKEKIANFRNTVNHKYSRYIVDFALRNRCGIIQMEKLEGINKDKTFLKSWPYYDLQQKIIYKANEAGITGKFIDPRYTSQRCSKCGYIDEENRPEQKTFICKSCGFETNADYNAALNIANPDIENLIKKELSREA

SEQ ID NO: 2675 - protein, 437 aa, unidentified
  REGION 1..437: note = Category: MG84 effectors
  REGION 1..437: note = Description: MG84-16 effector
  source 1..437: note = uncultivated organism sequence
MSNILSMPVKVMRYQIVKPVDADWELLGKVLRDLQDDTRKVLNKVIQLCWEWQGFSAEYKQQYGIYPKTSDFSHYKNIDGYCYKKISDFFTRLHTGNLSMTIKRGVQRWKTDLAEVIKGSKSIASFRSNCPIDIHNKSINIFNVEKEYYAKLSLLSKTYKKELSRDLGQITVLINPGDKSGKDILDRCISGEYKISSSQILQKKDTNTSKNNKWLLNLSYSFKSQKKIVDSNKVLGIDMGIIFPVYMAIHGTLIRDKIDGGEIEHFRKEVENRKIKLQRQGKYCGQGRIGHGTKTRVRPIEFAKEKIANFRNTVNHKYSRYIVDFALRNRCGIIQMEKLEGINKDKTFLKSWPYYDLQQKIIYKANEAGITVKFIDPRYTSQRCSKCGYIDEENRPEQKTFICKSCGFETNADYNAALNIADPDIENLIKKELSREA

SEQ ID NO: 2676 - protein, 377 aa, unidentified
  REGION 1..377: note = Category: MG84 effectors
  REGION 1..377: note = Description: MG84-17 effector
  source 1..377: note = uncultivated organism sequence
NWSNAVRAKTGVYPTKDEVLERYGSSVRTYIYRTIPQEYNNTSNTSTVLQNVNKHFTQNKKEVMQGKRSVDSYKSTLPIALHGNSIKIEKSGNKYLISLSLLSNGYKKQLGVKRGQITFELMFGRSWSSRQIVDSILSGEFSHTASSIIYKNRKWFLNLGYSYPEKEPIKFIDGRTMGIDLGIVKPLVIAFNDNPAHFEVDSDEISEFRKEIHSRRSSLGRQTKHCAESKIGHGVHKRIEGCEKLAQKEANFRDRVNYQYSRYVVDLALKYKCKTIQMEDLTGISKDSTFLKSWPYFDLQTKIEYKAKENGIDVIKINPKFTSQRCSKCGYISEANRPEQAIFQCKKCGFGINADWNAALNISIPGIEKIIKDSKVE

SEQ ID NO: 2677 - protein, 398 aa, unidentified
  REGION 1..398: note = Category: MG84 effectors
  REGION 1..398: note = Description: MG84-18 effector
  source 1..398: note = uncultivated organism sequence
REMMQIANRTVQLYWEFSGYQSDYKKRFDAYPDKEQLLEDLKYSNLRSYTYAVIAKEFYKNNTGNVATLLQNVDKRYKQNQKDVRLGKRSIDSYKATIPISLHRKSIQISKSKEDYDIRISLLSNVYRKELGVKSGLIYFKLITGKSYSSKQILESILSGEFHYTASSISYRKGKWFLNLGYNFESEEPELRPSRVMGIDLGVVKPLVIAYNDTPVHQEIDSNEIQAFRNQMLDRRRALGRQTKHCAESNIGHGVKTRTKALEKLKQTEANFRDRINHQYSRYVVDLAVKYKCKTIQMEDLSGISKDDIFLKNWPYYDLQTKIEYKAKEKGIDVVKINPKFTSQRCSKCGYISPENRPDQATFQCKKCGFSLNADWNAALNIAQPGIEEIIRETIKQK

SEQ ID NO: 2678 - protein, 640 aa, unidentified
  REGION 1..640: note = Category: MG85 effectors
  REGION 1..640: note = Description: MG85-1 effector
  source 1..640: note = uncultivated organism sequence
MCTIKCMSQITIQCRFISSESTRHRIWELMAEKNTPLINELLEQVGQHPEFETWRQKGKLPSGIVSKLCQPLKKEERFIGQPSRLYISAIHVVDYIYKSWLALQLRLQRKLEGQTRWLEMLKSDSELIEVTGCSLDAIRTRAAEILAQSASQSDPVTRQQTQDKKKKKFKAKNSNTSLSNTLFEIYRNTEDILTRSYISYLLKNGCKVSDKEEDAEKFAKRRRKVEIRVERLQEQLKSRMPKGRDLTSDHWLETLVIATHNVPKNEDEAKSWQASLLRKSSSVPFPLVYETNTDLTWFKNQKGRICVNFSGLSEHTFEIYCDSRQLHWFKRFLEDQQIKHDSKNQHSSSLFTLRSARLNWQEGEGKGEPWNVHRLTFYCTVDTRLWTNEGTEQVREEKAFEIARTLTRMKEKGDINKNQQAFVKRKHSTLARINNPYPRPSQPLYKGQSHILVGVSLGLDKPATVAVVDATTGEVFTYQSIRQLLGDNYKLLNRERKQQQSKSHQRHKAQKSAAPNSFGESELGQYVDRLLAKAIVAIAQTYQASSIVLPKIGDMREIVQSEIQARAEAKCSVIEGQKKYAKQYRCSVHKWSYGRLIESIQSQAAKTGIAIEEGQQPIRGSPQEQARELAIIAYKSRKLL

SEQ ID NO: 2679 - protein, 467 aa, unidentified
  REGION 1..467: note = Category: MG85 effectors
  REGION 1..467: note = Description: MG85-2 effector
  source 1..467: note = uncultivated organism sequence
MFPSFCSPPFLSYFSTPLNGYNRCAISYLLKNGCKINDKEENPEKFAQRRRKLEIQIQRLTEKLAARIPKGRDLTDTQWLEALFTATQTVPENETEAKFWQNSLLKKSSSVPFPVAYETNEDLVWVKNQFGRICIKFSGLSEHTFQIYCDSRQLHWFQRLLEDQKIKKNSKNQHSSALFTLRSGRISWQEGEDKGDPWNVHHLTLYCSVDTRLWTEEGTNLVKEEKAEEIAKTITQTQAKGDLNDNQQAHIKRKNSSLARINNPFPRPSQPLYQGQSHILVGVSLGLENPATIAIVDGTTSKVLTYRNIKQILGDNYKLLNKQRQQKHLLSHQRHIAQRMAASNEFGDSELGEYIDRLLAKEIIAIAQTYKAGSIVLPKLGDMREQVQSEIKAKAEQKSDLVEVQQKYAKQYRVSVHQWSYGRLIANIQCQANKAGIVIEEAKQPIRGSPQEKAKELAINAYQSRKA

SEQ ID NO: 2680 - protein, 641 aa, unidentified
  REGION 1..641: note = Category: MG85 effectors
  REGION 1..641: note = Description: MG85-3 effector
  source 1..641: note = uncultivated organism sequence
MSVITIQCRLVAKEFSLRYLWELMAQKNTPLVNELLQAIVQHSDFESWLQKGSIPQATIKALCDSLKNDPRFSGQPGCFYTSATSLVSYNYKSWFALQKRRQQKIEGKERWLNLLKSERELEEECDRTLEEIRAKATQILTQFQPQAENAETPPGEATQKKKGKKSKSTPSKGKAASLFNTLFNAYAQTKDPLERCALAYLLKNNGEVSLVEEDLEAYQQRRRKKEIEIERLKEQLKSRHPKGRDLTAEKWLETLEAARTQQPESEAEAATWQANLLRNSSPVPFPVNYETNEDLTWFKNEAGRICVFFSGLREHHFEVWCDNRQLHWFERFFQDQQIKRQSKNQHSSSLFTLRSGRIGWQECTGEGEAWNIHHLKLYCTLDTRLWTAEGTEQVAQEKAAEISNILTKTKQKDDLNEKQLAFIKRGETMLARINTPFPRPSKPLYQGQSEIVVGVSLGLEKPATVAVIDVPGDRVLAYRNVKQLLGDHYPLLNRRRQQQRSLSQKRQKAQKQGAANEFGESELGQYIDRLLAKEIVAIARSYQAGSIALPKLTDIREILHSEMQTRVEKKIPGYKEAQDKYAKQYRVNVHRWSYGRLMDAIASQAAKVGIVIEVGKHPSEGSFQDKAREVAISAYCDRSVN

SEQ ID NO: 2681 - protein, 669 aa, unidentified
  REGION 1..669: note = Category: MG90 effectors
  REGION 1..669: note = Description: MG90-1 effector
  source 1..669: note = uncultivated organism sequence
MLVAKFGVRKFLTGESLALAEMRAAAQYYQSLVTIERWRRSQFAAIRSETVPGLGEIDEAYQQLDEWIGEHAGKGGKRGGIREKRRKATAATGRPVKPVKKAVDVSDEVDLITELKAWRKAAAELAKPMRGQFAAVVEPAQQEFTARSARLRSAWGSNDGDRHAKRRSDIQARDEMLAEAQWPEAWRRLAQLETQADALRGWIKEARLLSVGTYHSIQRVDLPAACKRPKPRPDGEPRRPKRRPTYSRRRLRRIGWEINDATWGDLLAGKNNELRITDVRNQGGANGGRVKQRATVHMRVRAETREALAAAPDYYRPKYDGPAGNWWVTMDVVLHRPIPPDTKVRWAYLVPSEESPGRWEYSLQFTLDPTEPLIQRAPGTGTVNVRLCWTQDNENKTLIVAHVNGEPLRLPGGAHERGRRAGVVESLRFAERLRSVADTLFDSARAEVAKRIASQPTRVFEAAHGLSQWRAHWKLKRVSAVMLEVLDKREEEYAMWKRWRDLRRAAHEDLFEPDIGKYAAILGLTTPDTIFTFWLAMWRRKDEHLEAMAAGARNHAMGRRRDFYRVTAAKLCTQFEICEVSGAVDLDQIALRDKAEDKPNELHQAARHNRQLACVHELKAALKAAFGPDRYKERDQSGAAKKAAAARDAANDVETNANTDEGPTVSAAE

SEQ ID NO: 2682 - protein, 716 aa, unidentified
  REGION 1..716: note = Category: MG90 effectors
  REGION 1..716: note = Description: MG90-2 effector
  source 1..716: note = uncultivated organism sequence
MSVDDPPLRSRARVLVYSYFCKPATEADEHALCEQLRLAALYRRELVQIENLARALQRAWSATYAESALEEERRRFRRMPPAEPDPVDPDAGSRWAEISAAARAWSDGATAREAGVRSLVALGVSEGLAQATVDQAKIASERSRAFNSVRRHFSQDLGLTWGTYQHAAEAFESQHRSVSMFDDVRVPPRAAVGCFAVHLQPARALRGSDDAWIRFGSIARLGSDRARGAEIDRSGRPRPARHHQVMLRIGTQADRRPRWVTVLALLDRPVPPTAIVSWAKVCRRRVGPTHRWELQITTQVDEACLVLDPSLAERAVRLWAAGVGKRGIARTLTMRIQDARRCALAALRAGISQGAGALDGQVQEATAALAHPPVPEPARSRGETVGVDIGWRRMGDAMRIARWWGTDGRSGELTIRRQVLDADVKADDLRGIRDQHKNEILAQLLDYTVSLRERSPRIPDADWIVAELPSMRQWRRAARLVGLVGRWRDHRIPGDDSIFEAVLGWLKQDRHLWAWEANQRQKRQRRVDEQIRLFVVWLCRQYGRIGVEAPMVAGLVRKVPRCVACASSPTRCTACSDRERLRRLTSTRVTHAAPARTRQLLETIAPTHGSVVIRLDPAYTTLDCALQDEAGLVCGHRRVEVVDWSPLEIACARCSGTEDQDLTAAKNLARRASGVALDEDGRPLATDSAGRSKASKRKLRPRRNRSGRRVDRSHPT

SEQ ID NO: 2683 - protein, 605 aa, unidentified
  REGION 1..605: note = Category: MG90 effectors
  REGION 1..605: note = Description: MG90-3 effector
  source 1..605: note = uncultivated organism sequence
MYAQKYGAKKPLEWTERHEQSFLDRRALWNDLVEVYRQARVRERELYSAADPEIESGYAEVDALDLALDAQPRQTDEERAAWRDILAQLKSTRAALWTKIRELKLGAEIKAQIRTIWQETQRATYTLACGKARKYPALHWADCNDLHDSLWKSIRAKKHPRPRTFTSRESLYRQLQSQTVGGVRVEVPDRKRRKIEGGTLTGATWDALTSERGYGGVKIQPYTLRRATRRWALLEFSIDSGATLRIPIRVHREPPKEALIKGVRVVRERIPGRRFPYEWSVVLSVAAEPLRSVIRCPSERTLYAGLGWRHTPEGLRVLAGIDDLGREWHVTLPEEYVLQWRYSRSLEAHLRLLRNAEAARLGVDPRSTRELFEHPDSRRWAYGEHLGEQTHAALLARNCEAAAAAEIFGERAGRARFSGLRSTLLRRRKDLYIRVARQIVGSSTRLVLGALDGADIQERTKDLPLPARHLRTIAAPTRLRDEIEWQARKAGVEVVTLDATNASRYCAVHPDVDLYAGRDESRLWLACEGCGVPLDRDANYARNLFRRDAPERFERCDWQALTRERSRLEIPNITHEVQRHWSTPQPRESRVQYTARLALANRDNC

SEQ ID NO: 2684 - protein, 445 aa, unidentified
  REGION 1..445: note = Category: MG90 effectors
  REGION 1..445: note = Description: MG90-5 effector
  source 1..445: note = uncultivated organism sequence
MTDAPATVTRTISLEVAKPLNCSWDELRVLLRTQRCIIPQLLRSGMDALIACGVVETKAVHGHVCPDARGTSPATVVYQSMKAELDRIQHGKWRDAARPALNLPAGMLSALARRVTQTYKLRPSFKGHQPIPVRRAELHVEADGDAVVVRVLLMGGGTGPRGGHRLLVRASEGFHWSIARRLAKGELAYGAGSLVFSERKDKWFVRIAYEAPVRVVQGADPSVALVVRRGVHTALMLMGTDGSYRRVPGEKVNAQLHALEARMRAARQIGADELGRGARGHGKRRRYAHYDALHGKRRRVVRTWCQQMGAAVVRQATRIGAGKVVIENFGGFAPDKSVAFIGSRFPFYQLKQSILEACEKRAIAVDEVAADYVSTTCPSCSVADARSHNRRTGTFHCLACGLSRPADFVAALNMLRRADVDSSTWDERMDQYKRLVESLKEQAAE

SEQ ID NO: 2685 - protein, 516 aa, unidentified
  REGION 1..516: note = Category: MG90 effectors
  REGION 1..516: note = Description: MG90-6 effector
  source 1..516: note = uncultivated organism sequence
METATEENHVDRVYQFGCRPPPGAEHEIALQLLGQAYLYRDDLRRAYNTQKRHVRMLLESKDAASHAIQFEHEMLKERIRSARASRGHLLDAGTYWLIEKAMLAASKANKLDPIRAQEWDGTGRIGAAIQSSAQFPAAAWNHSRVKLSKEDAQQFNTRKGPGSRSHDEDAVLTIFVGEAKAERALHWPVKLHRDFPSGAIVKQVAVQRTRSGHRFRWKVLITISHERSNERDPEAKGVVGLDVGWRTEGDLGMRVATHDASDDADALRIHTPEALFYADAVDSTRDMLFNEAKEYAFSSGLPGTEHARLWRDKERMRRLARSTQDLGAVWWHERDRHLRDISCAVRLRSIRRRLDAFRSYADSLAKRYRMIALEDMPMIDWVGKGKTAALERLRSIASLSLLQNIIAERFGAERVDWVPAAHTSMVCSSCKVQRELTVGPGPHWVCAACGHEHHQDYNAATNLRLLSEQWIADGKSLRARKRKSKKGNEKKHVNAIATGDALGMTVTARKSIATAA

SEQ ID NO: 2686 - protein, 645 aa, unidentified
  REGION 1..645: note = Category: MG90 effectors
  REGION 1..645: note = Description: MG90-7 effector
  source 1..645: note = uncultivated organism sequence
MYAQRYGAKAPLEWTEAHARVLLLADQLWDDLRAIWIQCLHEQEMAEDATGDAELLSARGAVSRTEAQVDAAFQARRDWRQRHRSKQAPEEIEASIKAAISAAREARRELWPVLKRVRKEIREELLDLWNARDQQMRVLAQGRTRKYTDLHDGVYNDIFKRFRVAAKEGAKQGIVPRPSHEHLSQSIYRQIQPHNFGGKLVSDPKKPGKRRKRIGGSQKGAEWSTLCTTGCGKVRVLPYSPGPRVTQRWGLLVMPVDANGLEIKIPIRVDDREPPQGAQIKGVRVVRRDRKWHTVFSVDAPPPSIERGAGTLYAGLNWRLMADGSLRVLDGIDETGKRYQVCLPRWQLAAVEYAEALQAATDRRAVQAALQLEADHPKRAKEIAEAVRRRNWAALYPLDTAWADGTHGKQGRRQHTALLRARKIAGGDLAKLTELVAEILGDRAGRRRIAGQKSKNTRRRESFYRECAQAIATRFGRLVVAKSDGRKLAKRVDEETGEESNLPAPARRNRQIAAPYSLMQYLRWAFVRAGSPVVDLEAKHKSHTCPICGQEMQGEASRGELYLSCSEHGMWDRDHALAAALWRDDAAGDHERWSLALSRRERPRAKIVRIDEEIGGSFTEHYHRLQYVSGGALEDKGKSRGATRR

SEQ ID NO: 2687 - protein, 482 aa, unidentified
  REGION 1..482: note = Category: MG90 effectors
  REGION 1..482: note = Description: MG90-9 effector
  source 1..482: note = uncultivated organism sequence
MKRDSNSPAERSRKAKAAKLARWKAAHPSVSRGLLYRMDPTVELGAGMGRMTDLDRALWNMTHQWWLMSSRPLRRVKKSDLDAVVAQARTDIPWLAELPAQACKAVAKRYWQTWERCWSGVGGAPNFHSRLKDRPSFDIPQARDLNITRVSKKFATVQVPKVGKVTIRYHRPIPVGARVTGARVTNDHGRWTLALRVELPKPELRSPVESRPVVGFDRGVVIPLAGSDGTEFNHPDWLTPGEKRHLRYLERQSARERHARWDRSDGRGKGRIGANERKTYDAIASVQAKAARRRKDWHHQTSRKIADGYSVAVFEALRIKNMTKSAAGSVKAPGTNVAAKSGLNRVILNEGWGTLLDLTRYKMADNGGAVVTVPAPFTSLTCHTCGSTTPGQRKNQALLVCGDTDCGWTGNADFNAACNILMRAVSGGLVPTLSAGIVDDARSRYELEERTDAMPPVGTEAPLKLDGPGKRENRLGQRTVAA

SEQ ID NO: 2688 - protein, 394 aa, unidentified
  REGION 1..394: note = Category: MG90 effectors
  REGION 1..394: note = Description: MG90-10 effector
  source 1..394: note = uncultivated organism sequence
MEEGSADKGHVTIVYPAYPNVDQERELLRTLGVVRGLYNHFLAESIADIMEGDRFPTPREMNKAITVMRGRDIGLVSVAVFTLRDAPLRVHAAMTSFARLSARSGELRLPRFKSESRYRSLAFDPKGVKFDGRRIVFGKWMKLRCGNLDRNRKLHRPEGGRIVTARIVRKGSGRWYVHITFEVDRRYRSEIDLSDPAEPEAYDLGLCDIITDSKGERIGAPDLYARHENEIARLQRQIASMEDGPKRRKKQRRLSVLHERIRRRRDGYLDEVADRMVSGHSAVILEDLRLRRMIERDNSPAPRRKLFTEAALGTLVRKVEAKAERACIPLVKVDPAYTTRRCSCCGHVGEKMPLSLRVFSCPRCGLEMDRDHNAALNILGSGMGTLRGSAEPSG

SEQ ID NO: 2689 - protein, 391 aa, unidentified
  REGION 1..391: note = Category: MG90 effectors
  REGION 1..391: note = Description: MG90-11 effector
  source 1..391: note = uncultivated organism sequence
MRRGGGSEDKWFVTRVYPAYPNRTQERELLRQLDVARGVYNHFAEACIHCLIDGTHVPDPMEMNREFTLMRADDCLLRSVNSYTLRETINRVWQAVEKCERRSLADGELHVPRIKTPPRFRSICFDPKSSKIENSRIRLNRELSVRCRNLARPRNGRAVAVRAVRRGTGRWYICITYETDRVVRGEMDVGEPDRAEGYDLGLVDLITDSRGNRVRAPDFFREGEAELAHLRRQLSRLEEGTAKWLKKRRRIARIEERIRRRRDGCLDRIADWMVSGKSVVVVEDIDVRRLASREDGTLVRRKRFTEAAWATLVGKAERKARKTDVRLIRVNPAYTTRTCSRCGHVGDGIPLSERMFRCPVCGLEMDRDRNAARNILGSGMGTQRCTAEPSG

SEQ ID NO: 2690 - protein, 430 aa, unidentified
  REGION 1..430: note = Category: MG90 effectors
  REGION 1..430: note = Description: MG90-12 effector
  source 1..430: note = uncultivated organism sequence
MSTITFEPPTCAFCGKKAEPNETFCHGNGNIYICTECVDEFHESINAANTFIENARKIQETDNMQKSRLPTPSQLKAHLDEYIIGQDYAKRVISVAVYNHYKMLKIKGQEKAGKTEKTVDLEKSNVLLLGPSGSGKTAIVRAIAKKLKVPFTMTDATLYSAAGYVGMDVECMVRQLVEAANGNIEAAERGIIFIDEIDKTSRKGENLSTTADPGHEGVQQSLLKLLEGNVVNVPEKGRRAHPEADTITVNTENILFIVGGAFEGIEKITAKRLRSENQAGTMGFGSQLVDKKNQQYNEYIEKVSTDDLKKFGMLPELLGRVPVIAPMKELTEDQLVEILHKPKNALTKQYQRLMAQDGVDLQFTDAALRVIARRAVEKKTGARGLRGIMEDILNPVMFETPDRNEDTIIIDANDDDVSITYQTKRRKEAV

SEQ ID NO: 2691 - protein, 402 aa, unidentified
  REGION 1..402: note = Category: MG90 effectors
  REGION 1..402: note = Description: MG90-14 effector
  source 1..402: note = uncultivated organism sequence
MQTVRYNYRLYPTKTQETVLNRLFGCCRVVYNDTIDFFNNNFNPNNQSKLPTAANASKQILTSAKKTVKRAFLKEVSSVALQQEFRNAWLACLHGVSHTSNQKPAKRKTKKHNPVNSANFTSNGFSINQHGVYISKIGVIKTKWSRPMPSEPTSCTISHARNGRWYASFVVKRPKTPFAQCDNNAGIDMGLTDMATIVNTKGDRWKIANPRNYAKIQDKIGRLQRHLSKQTKGSKRYERTRHQIALLYSKAHDALADYQWKNVLNIIRETQAIGVETLDIKSMTAKHGKSVRDASMRSFLNKLGSKADEHCRVIIRLNQWLVTTKVCALCKHKLKVGLPEYARHWVCPKCGAHLDRDYNAALNILDAAGLAGSLNARGGSVISFLASAENGCSRRTAYHPNF

SEQ ID NO: 2692 - protein, 533 aa, unidentified
  REGION 1..533: note = Category: MG90 effectors
  REGION 1..533: note = Description: MG90-15 effector
  source 1..533: note = uncultivated organism sequence
MANVLNYKYGIFPTAPQRKHLTRRMRECRLQYNRAVSTRKRLKGSLMCYKTLPVLHEVMGLEKDNTNPNRRTAIEKVGAAYPNIPKDKWSRIYDLKTIFGKTFDIKKRHCDLKVLAAECDALLRAELTEFRAHFRQPESTRPARPPKRPVYFKLLQAASRHAGYEAKIHMDRAFGSRLGISRIRFSVSGCSGGTVANFERACDPSPDQRRIGASGEPNYKRRVDAYGYQVFRNEDILTGNKIKIRGLPTGMDEVEINLHRPLPDGHKLKRVAVMERGGQWQVVMTLEVTDETYQLVPSCPRKAIGLDPGTATALTSAVLDRDTGSIEYGAWDWSPLDAAEDKMEAISQKLSGMQGPDRRTGQRASNRWKKLNARRRRLHATIARRRLDMHHKISRELVNHGLVAIGNWEPPKVVKGRKEFRKGKTKAVEAGPKGIKAKRRGGRDRGIATLRSLAAQKGVRAGVEVIASADERYTTQQCSKCKELTGPKQDLSTRKWTCSKCGSEHDRDQNAALNILNLALEASAKMGTQSLEK

SEQ ID NO: 2693 - protein, 533 aa, unidentified
  REGION 1..533: note = Category: MG90 effectors
  REGION 1..533: note = Description: MG90-16 effector
  source 1..533: note = uncultivated organism sequence
MANVLNYKYGIFPTAPQRKHLTRRMRECRLQYNRAVSTRKRLKGSLMCYKTLPVLHEVMGLEKDNTNPNRRTAIEKVGAAYPNIPKDKWSRIYDLKTIFGKTFDIKKRHCDLKVLAAECDALLRAELTEFRAHFRQPESTRPARPPKRPVYFKLLQAASRHAGYEAKIHMDRAFGSRLGISRIRFSVSGCSGGTVANFERACDPSPDQRRIGASGEPNYKRRVDAYGYQVFRNEDILTGNKIKIRGLPTGMDEVEINLHRPLPDGHKLKRVAVMERGGQWQVVMTLEVTDETYQLVPSCPRKAIGLDPGTATALTSAVLDRDTGSIEYGAWDWSPLDAAEDKMEAISQKLSGMQGPDRRTGQRASNRWKKLNARRRRLHATIARRRLDMHHKISRELVNHGLVAIGNWEPPKVVKGRKEFRKGKTKAVEAGPKGIKAKRRGGRDRGIATLRSLAAQKGVRAGVEVIASADERYTTQQCSKCKELTGPKQDLSTRKWTCSKCGSEHDRDQNAARNILDLALEASAKMGTQSLEK

SEQ ID NO: 2694 - protein, 394 aa, unidentified
  REGION 1..394: note = Category: MG90 effectors
  REGION 1..394: note = Description: MG90-17 effector
  source 1..394: note = uncultivated organism sequence
MEEGSADKGHVTIVYPAYPNVGQERELLRTLGVVRGLYNHFLAESIADVIEGDRFPTPREMNKAITVMRGRDIGLGSVAVFTLRDAPLRVHAAMTSFAKLSARSGELRLPRFKSESRYRSLAFDPKGVKFDGRRIVFGKWMKLRCGNLDRNRKLHRPEGGRIVTARIVRKGSGRWYVHITFEVDRRYRSEIDLSDPAEPEAYDLGLCDIITDSKGERIGAPDLYARHENEIARLQRQIASMEDGPNRRKKQRRLSVLHERIRRRRDGYLDEVADRMVSGHSAVILEDLRLRRMIERDDSPAPRRKLFTEAALGTLVRKVEAKAERACIPLVKVDPAYTTRRCSCCGHVGEKMPLSLRVFSCPRCGLEMDRDHNAALNILGSGMGTLQGSAEPSG

SEQ ID NO: 2695 - protein, 394 aa, unidentified
  REGION 1..394: note = Category: MG90 effectors
  REGION 1..394: note = Description: MG90-18 effector
  source 1..394: note = uncultivated organism sequence
MEEGTADKGHVTIVYPAYPNSSQERELLRTLGVVRGLYNHFLAESIADVMEGDRFPTPREMNKAITVMSGQDAVLRSVSVFTLRDAPLRVHAAMTRFARLSARSGELRLPRFKSESRYRSLAFDPRSVRFDGRRIVFGKWIKLRCGNLDRGRSLHIPEGGRIVAARIVRKGSGRWYVHITFEVDRRYRSEIDLSDPAEPEAYDLGLCDIITDSKGEKIEAPDLYARHENEIARLQRQIASMEDEPGRREKQRRLSVLHERIRRRRDGYLDQVANHMVSGHSAVILEDLRLRRMIERDDSPAPRRKLFTEAALGTLVRKVEAKAERACIPLVKVDPAYTTRRCSCCGHVGDKMPLSLRVFSCPRCGLEMDRDHNAALNILGSGMGTLRESAEPSG

SEQ ID NO: 2696 - protein, 427 aa, unidentified
  REGION 1..427: note = Category: MG90 effectors
  REGION 1..427: note = Description: MG90-19 effector
  source 1..427: note = uncultivated organism sequence
MEQKKNICSVCGKPYDSHLFFFTHDKEDMCICFDCVEKIYGRIQQDKERYPATENIDETRPPAKKNGRIKPSDIKAYLDQYIIGQDKAKQVLAVAICNHYKMYRLKKNGAVDSIHKEMEKSNVLIVGPSGCGKTAVVKRLGKFLQVPVITVDITAYSAAGYVGKDVETILRDLWIAAEGDISLAEKGIVYIDEVDKISRKGENLSTTTDPGHEEVQQGLLKMLEGNTIDVPKRGNREHPQAETIKINTENILFILGGAFEGIEKIIAQRHKRKSGGSIGIGAVIEDMDDEQTFNKNILDIRTEDLKKFGMLPEFLGRIPVICPMQELTEEALVNILTKPKNAIVKQFQALLADDDIELEFTDKALNKIAQQAIERKTGARSLRGVMEDIMNPVMFRIPDEEGLNKVVVDVDKDDNFDIKEIKEENAA

SEQ ID NO: 2697 - protein, 370 aa, unidentified
  REGION 1..370: note = Category: MG90 effectors
  REGION 1..370: note = Description: MG90-20 effector
  source 1..370: note = uncultivated organism sequence
MQAVDGLDINILTPAEIKNGLDQYVIGQDEAKRVLAVSVYNHYKRILSGKGADVELQKSNVLLLGPSGVGKTLLAQTLAKMLGVPFAIADATTLTEAGYVGEDVENILLKLLQAADFDVQKAQVGIIYIDEIDKITRKSENPSITRDVGGEGVQQALLKILEGTVSNVPPNGGRKHPQQEFIQIDTTNILFICGGAFDGLDKYILRRTDRSALGFGSSLKDNSEDAQRALLRKVEPHDLVKFGLIPELIGRLPVITVLDDLDEDALVRVLKEPRNSLVKQYKELLSMDSVELEFTDEALHAIARKTIERKTGARGLRSVMEGILLPVMYDVPNDPTIIRVTIDKDTVEGGEAHLEYGAVRKRYKNQTALS

SEQ ID NO: 2698 - protein, 408 aa, unidentified
  REGION 1..408: note = Category: MG90 effectors
  REGION 1..408: note = Description: MG90-21 effector
  source 1..408: note = uncultivated organism sequence
MVNKNNEFCCMCGSKEDEVDKLIRGKYGYICDNCISIASDLLNDDEEEKNITNNMQLATPSQIKAHLDQYVIGQDEAKRTLAVAVYNHYKRLKQNKKSDVEIQKSNILMIGSTGSGKTYLAQSLAKFLGVPFAIADATTLTEAGYVGDDVETMLRTLLQNANYNIESAQRGIIYIDEIDKISRKGENMSITRDVSGEGVQQALLKIIEGTISEVPVTGGRKHPQGETVKINTSNILFICGGAFDGIEKIIGKEEIHNSIGFGANITDKKESVADLSKVEQHDLVKYGLMPELIGRLPIITTLNPLSEDDLVHILTEPKNAITKQYQELLAMDGVKLEFEDEALRKIAELAIQKKSGARGLRSIIESAMQKVMFDVPDMSSAKKVVITAECVEGKADALVYGARNKKIA

SEQ ID NO: 2699 - protein, 366 aa, unidentified
  REGION 1..366: note = Category: MG90 effectors
  REGION 1..366: note = Description: MG90-22 effector
  source 1..366: note = uncultivated organism sequence
MRNRGGPWNICGKFPPEIKKFLDEYVIGQEYAKKVISVAVYNHYQRITAPRTAPQLDKSNILLIGPTGVGKTLIAETLARFLKVPFAIADATPLTEAGYVGEDVENILLRLLQAADGNIQLAEIGIVYIDEIDKIGRKSESPSITRDVSGEGVQQALLKILEGTVANVPPQGGRKHPGQQFLQVNTRNILFICGGTFEGLDKIIERRICSGTIGFAANITRTHPENEDELLRCVQPDDLIKYGMIPEFVGRLPVIAPLHSLSQSALIDILTQPKNALLKQYAYYFEREGVKLTFTPEALAAVAERALQLRTGARGLRAVLEETMLEIMFELPTRHNIIECIITPEVIRKEKPPVYIHGRRTVRRTH

SEQ ID NO: 2700 - protein, 412 aa, unidentified
  REGION 1..412: note = Category: MG90 effectors
  REGION 1..412: note = Description: MG90-23 effector
  source 1..412: note = uncultivated organism sequence
MFETKIPIRRCSFCGKGQNEVEALITGPNGVAICNVCVDECYEMIHQKEGEKGKSPVEIGKLPTPKEIKEFLDQYVIGQEEAKKVLSVAVYNHYKRIISREKGEDEVELEKSNILLIGPTGSGKTLLARSLAKLLDVPFAIADATTLTEAGYVGEDVENILLRLIQAADYDIEKAERGIIYIDEIDKISRKSENPSITRDVSGEGVQQALLKILEGTIANVPPQGGRKHPHQQYIQIDTSNILFICGGAFVGLEEIIARRIGKGTMGFTADVDKIKMDRDQLLKYVEPDDLVKFGLIPELIGRLPVVATLSELKEEDLVRILKEPKNALVKQYQKLLELEGVELVFTDDALREIAREAIRRKTGARGLRAIMEKIMMDVMFEVPHRKEIKKVIIDKKAVKTGKPKYEVAKAS

SEQ ID NO: 2701 - protein, 427 aa, unidentified
  REGION 1..427: note = Category: MG90 effectors
  REGION 1..427: note = Description: MG90-24 effector
  source 1..427: note = uncultivated organism sequence
MAKNDEKLIRCSFCGKREDEVDRIVRGLDAFICNECVKLCGEIMGFDYEEPEYTVEQYEGDLPFQEIPKPREIKEYLDEYIIGQDEAKKAISVAVYNHYKRILAEDQGDTELQKSNVLLIGPTGSGKTLFAQTLAKLLKVPFAIADATTLTEAGYVGDDVENILLRLLQAADFNVPLAEHGIIYIDELDKIARKSENTSITRDVSGEGVQQALLKILEGTVAGVPPLGGRKHPQQEFIQVNTKNILFICGGAFDGIEKIIEQRLDKKSMGFGADIKSKRERAAGEIMLSVRSHDLQKFGIIPELIGRMPVIVPMKQLTRDDLVRILKEPKNAITKQYKALMKYDGVTLEFEEGALEAIADRAIELDIGARGLRSVVESIMTDVMYDVPSQDRIEKVIITEASVREGTGPKLVRRPKPRIDPDLALNL

SEQ ID NO: 2702 - protein, 442 aa, unidentified
  REGION 1..442: note = Category: MG90 effectors
  REGION 1..442: note = Description: MG90-25 effector
  source 1..442: note = uncultivated organism sequence
MARNDQMRLRCSFCGKTQDQVDKLISGMNDTFICDECVELCAELVNDDLELRAAQKRQRAQKNAKPLPKPQEIKATLDEYVIGQDRAKITLSVAVYNHYKRIFCGDQTDVELQKSNVLLLGPTGVGKTMLAQTLARTLDVPFAVADATTLTEAGYVGEDVENILLRLIQAAEFDVERAETGIIYIDEIDKIARKSENPSITRDVSGEGVQQALLKILEGTVSNVPPQGGRKHPQQEFIQVDTSNILFICGGAFDGIEKIVEKRSGNGGLGFGAEIKSTKELELTEAMQNVIPQDLVKYGLIPELVGRIPVLTTLDDLDEDALVRILKEPKNSLVKQYQELFRMDNVELELDDAALRAIAKETLEKKTGARGLRGVMERVLQPLMYESPSDYRIEKITITEDYVLGNSEPLLVRNEAREQPAPLLVAPASAAPQRRNRRGNVS

SEQ ID NO: 2703 - protein, 405 aa, unidentified
  REGION 1..405: note = Category: MG90 effectors
  REGION 1..405: note = Description: MG90-26 effector
  source 1..405: note = uncultivated organism sequence
MLIQGPDAYICDECVENCRSIIEGGESSKRRQSNRRTPSPRVLPKPQEIKAQLDEYVIGQDEAKIALSVAVYNHYKRIYRRHRVDVELVKSNILLLGPTGVGKTLLAQTLAKTLDVPFAIADATTLTEAGYVGEDVENILLRLIQAADYDVEKAQRGIIYVDEIDKIARKSENPSITRDVSGEGVQQALLKILEGTVANVPPQGGRKHPQQEFIQIDTSNILFICGGAFDGIEKIVEKRLGNKVLGFGSELQSKSEFEADTVMTKVIPADLVKFGLIPELVGRMPVLTALRNLDENALVKILTEPKNALIKQYKGLFSIDNVELDFEDDALKLIAKTALESKTGARGLRAIMERILLPVMFTTPSDPSIEKITITADCVKNAGMPEIEKNPARLAPKNLPADTTA

SEQ ID NO: 2704 - protein, 427 aa, unidentified
  REGION 1..427: note = Category: MG90 effectors
  REGION 1..427: note = Description: MG90-27 effector
  source 1..427: note = uncultivated organism sequence
MEKSKLDVVCSFCGKKIPSDVMVAQGIDEDTFICQHCLIALEETFRAADTLIENEEEEHKKDDKKHKRLPRPSEIKAHLDQYIIGQEYAKKVLSVAVYNHYKMLGVKFGNKAVNKDVELEKSNVLLAGPSGSGKTAILKALAKFLKVPFVIADSTEYTSAGYVGKDVECIARDMISAANGDIKKAERGIVYIDEIDKTSRKGENLSTTSDPGHEGTQQALLKLLEGTMLDVPMDGRRLNPESRNVQKISTENMLFIVGGAFEGIEKIIAKRKRQGQNTMGIGAKLVDRKNDKYNDFIEDLATEDLKKFGMLPELLGRVPVIAPLKELTEDQLVQILHEPKNALVKQYQELFIQDGIQLEVTENAMKAIARKAIKRKTGARGLRGIMENILNPVMFSAPDKDIDYVLVDAEDDEIKIKGKKRKVKEAV

SEQ ID NO: 2705 - protein, 475 aa, unidentified
  REGION 1..475: note = Category: MG90 effectors
  REGION 1..475: note = Description: MG90-28 effector
  source 1..475: note = uncultivated organism sequence
MKDYEEELKDTKDGSGKNENKEDYEDICYICRRPESKVGKLIHLPMEGICICPDCMQRSFTAMSNTNINYEDLMRNMNLQDMFPGNIQDGIPKSQRLKKKKPKDKNEPAIDLKQILPPHQIKARLDDYVIGQDYAKKVMSVAVYNHYKRVATNTMDEIEIEKSNMLMIGPTGCGKTYLVRTLARLLDVPLAIADATSLTEAGYIGDDIESVVSKLLAAADNDVEKAERGIIFIDEIDKIAKKKNTTSRDVSGESVQQGLLKLLEGSDVEVPVGASSKNAMVPLTTVNTRNILFICGGAFPDLEGIIKARLNKTSGIGFGAALNDAHDQDPDIMSRVTIDDLREFGMIPEFIGRLPVIFTLKGLDEEALVKILKEPKNAIIKQYQKLLALDEVDLQFDDGALEAIAKRAIEKKTGARALRSIIEELMLDIMYQIPKDDNIGRVTITQPYVEHTGGPLIEMRGVFSLPNKTPAVGIE

SEQ ID NO: 2706 - protein, 427 aa, unidentified
  REGION 1..427: note = Category: MG90 effectors
  REGION 1..427: note = Description: MG90-29 effector
  source 1..427: note = uncultivated organism sequence
MEKEGKIYCDFCGKEIEPGEFGATGINGVFICQDCLKEFHESVMAQDTYLESEKKKQEREEVEKEDFQIPRPSMIKAHLDKYIEGQDYAKRVLSVAVYNHYKMLRAKHSGEYNNKDVELEKSNILLCGPTGSGKTAVLRALSKYLKVPFTMADITSYSSAGYVGKDVETIIRDLIVAADGDVKAAERGIVYIDEIDKTSRKGENLSTTSDPGHEGVQQALLKLLEGQMVEVPNKGRRLHPESNNTTMVNTANILFIVGGAFEGIEKIVSQRLHQHSSSMGFGAKLEDKKNDQYNDFIEKVTTEDFRKFGMLPELLGRVPVIAPMKQLSEEQLVHILYRPKNALVKQYQELLSQDNVDLKFTQKALKSIAHDAIKRKTGARGLRGIMEDILNPVMFEVPDKDVDAVVVDADDDDKIKIEYKDLKKEAV

SEQ ID NO: 2707 - protein, 416 aa, unidentified
  REGION 1..416: note = Category: MG90 effectors
  REGION 1..416: note = Description: MG90-30 effector
  source 1..416: note = uncultivated organism sequence
MSDELENLRCNFCGFKADLEEGIILIKGLDDVCICSECAEECVAIAEEENKIDSEKEMNLDVKPSEIKAYLDKYIIGQNYAKETLSVAVFNHYKMLKYKQQKKQAVELEKSNVLILGPTGTGKTYILRTLANFLNVPFAISDATSLTEAGYVGEDVENVVRRLIDAADGDIERAQTGIIYIDEVDKLTRKGENVSITRDVGGEGVQQAILKMVEGSLVEVPPQGGRKHPQQECAKIDTSNILFIIGGSFEGIDKIISKRQTKDSTIGFGGQIIDKKETSINEVIESVTVDDLKKFGMIPELLGRFPVIAPLKELDNNALQSILTEPKNALVKQYQELFKMDGIKLTFRKDALKAIAQLAQERKTGARALRGIMEDVLHKHMYSLPDDSTIKEVIITEDVVLKKSDPEIKRKKEQAS

SEQ ID NO: 2708 - protein, 419 aa, unidentified
  REGION 1..419: note = Category: MG90 effectors
  REGION 1..419: note = Description: MG90-31 effector
  source 1..419: note = uncultivated organism sequence
MISTIFINKGEFIMAKNNEFCCMCGSKKDEVDKLIRGKYGYICDSCISIASDLLNDEEEENITNNMQLATPSQIKAHLDQYVIGQDEAKRTLAVAVYNHYKRLKQNKKSDVEIQKSNILMIGSTGSGKTLIAQSLAKFLGVPFAIADATTLTEAGYVGDDVEVMLRTLLQNANYDIESAQRGIIYIDEIDKISRKGENVSITRDVSGEGVQQALLKIIEGTISEVPVTGSRKHPQAETIKIDTSNILFICGGAFDGIDKIIGKEETHNSIGFGANVADKKESVADLSKVEQHDLVKYGLMPELIGRLPIITALNPLSEEDLVHILTEPKNAITKQYQELLSMDGVKLEFEGEALRKISELAIKKKTGARGLRSIIESAMQKVMFDVPDMASVKKVVVTADCVEGKADALVYGARNKKIA

SEQ ID NO: 2709 - protein, 428 aa, unidentified
  REGION 1..428: note = Category: MG90 effectors
  REGION 1..428: note = Description: MG90-32 effector
  source 1..428: note = uncultivated organism sequence
MAKQEPQHIKCSLCQRDITVHDQYDLPIYDPRSGFAICKSCIREIYHFIEENDHQEAIVQQKDFAMTLDAKLAKIKPHIIKQYLDEYIINQERAKKILSVAVYNHYKRMKYSYLHEDETEIEKSNVIMLGPSGCGKTALLSHLATLLDIPFAVTDASSLTEAGFVGADVEVAVRNLYYAADKNTEKAEHGIIYLDEFDKIARKSGENNSITADPGHEGVQQALLKMLEGSVVEFTARGQRKHPEAPTIKVDTRNILFIVGGAFVGIEKIIAKRLKNTDTNIGFGAKVPSKEEKPKFDELIHKVRPEDLMKFGIIPEIIGRLPVICTLETLDEDALLRILTEPKNAPVKQYEKLLAMDNVQLEFSDTALRAVARKAIERKTGARSLKGIIEDVMLDIMFDIPKSDAKRKVTITEECLEKGENPKIEEIA

SEQ ID NO: 2710 - protein, 410 aa, unidentified
  REGION 1..410: note = Category: MG90 effectors
  REGION 1..410: note = Description: MG90-33 effector
  source 1..410: note = uncultivated organism sequence
MLETQIPPRRCSFCGKESAEVEALITGPKGVAICNFCVDECYEMIHSQVQEEKNIGEPANLPTPKEIKEFLDQYAIGQDEAKKVLSVAVYNHYKRIFSQTSSDDVDIEKSNILLIGPTGSGKTLLARSLAKLLDVPFAIADATTLTEAGYVGEDVENILLRLLQNADMDVEKAERGIIYIDEIDKIGRKSENSSITRDVSGEGVQQALLKILEGTVANVPPQGGRKHPQQQYIQIDTSNILFICGGAFVGLEDIIAKRIGKGTMGFNADLNKKKLERDELFQHVEPEDLVRFGLIPELIGRLPVIATLSELREEDLVKILNEPKNALVKQYKKLLDLEGVELEFTEEALREIAKEAIKRKTGARGLRAIMEKIMMDVMFEVPTKKNIKKVIIDNEAVLEGKPKYKLAKAS

SEQ ID NO: 2711 - protein, 474 aa, unidentified
  REGION 1..474: note = Category: MG90 effectors
  REGION 1..474: note = Description: MG90-34 effector
  source 1..474: note = uncultivated organism sequence
MKDYEEVKDTKDITEETEHKDDYEDVCYLCRRPESKVGKLIRLPMEGICICPDCMQRSFTMMGNTNINYEDLMKNMNLQDMFPGNIQDGIPKSQRLKKKKPKEKNEPVIDLKQILPPHQIKARLDDYVIGQDYAKKVMSVAVYNHYKRVATNTMDEIEIEKSNMLMIGPTGCGKTYLVRTLARLLDVPLAIADATSLTEAGYIGDDIESVVSKLLAAADNDVEKAERGIIFIDEIDKIAKKKNTTSRDVSGESVQQGLLKLLEGSDVEVPVGASSKNAMVPLTTVNTRNILFICGGAFPDLDGIIKARLNKTSGIGFGAMLSDAHDQDSDIVSQVTIDDLREFGMIPEFIGRLPVIFTLKGLDEAALVKILKEPKNAIIKQYQKLLALDEVDLQFDDGALEAIAKRAIEKKTGARALRSIIEELMLDIMYQIPKDDNIGRVTITQPYVEHRGGPLIEMRGIFSLPNKTPVAGIE

SEQ ID NO: 2712 - protein, 359 aa, unidentified
  REGION 1..359: note = Category: MG90 effectors
  REGION 1..359: note = Description: MG90-35 effector
  source 1..359: note = uncultivated organism sequence
MTPAEIKEGLDQYVIGQDEAKRVLSVSVYNHYKRILSGKGGDVELQKSNVLLLGPSGVGKTLLAQTLAKMLGVPFAIADATTLTEAGYVGEDVENILLKLIQAADFDVQKAQIGIIYIDEIDKITRKSENPSITRDVGGEGVQQALLKILEGTVSNVPPQGGRKHPQQEFIQIDTTNILFICGGAFDGLDKYILRRTDKSALGFGSALKDNSTEAERALLRKVEPHDLVKFGLIPELIGRLPVITVLDDLDEDALVRVLKEPRNSLVKQYKELLGMDNVELTFTDEALHAIARKTIERKTGARGLRSVMESILLPIMYEVPSDATIIRVTVDEDTVEGGEAHLEYGAVRKRYKNQAALS

SEQ ID NO: 2713 - protein, 428 aa, unidentified
  REGION 1..428: note = Category: MG90 effectors
  REGION 1..428: note = Description: MG90-36 effector
  source 1..428: note = uncultivated organism sequence
MAKQEPQHIKCSLCQRDITVHDQYDLPIYDPRSGFAICKSCIREIYHFIEENDHQEAIVQQKDFAMTLDAKLAKIKPHIIKQYLDEYIINQERAKKILSVAVYNHYKRMKYSYLHENETEIEKSNVIMLGPSGCGKTALLSHLATLLDIPFAVTDASSLTEAGFVGADVEVAVRNLYYAADKNTEKAEHGIIYLDEFDKIARKSGENNSITADPGHEGVQQALLKMLEGSVVEFTARGQRKHPEAPTIKVDTRNILFIVGGAFVGIEKIIAKRLKNTDTNIGFGAKVPSKEEKPKFDELIHKVRPEDLMKFGIIPEIIGRLPVICTLETLDEDALLRILTEPKNAPVKQYEKLLAMDNVQLEFSDTALRAVARKAIERKTGARSLKGIIEDVMLDIMFDIPKSDAKRKVTITEECLEKGENPKIEEIA

SEQ ID NO: 2714 - protein, 411 aa, unidentified
  REGION 1..411: note = Category: MG90 effectors
  REGION 1..411: note = Description: MG90-37 effector
  source 1..411: note = uncultivated organism sequence
MFETNIPERRCSFCGKAQSEVEALITGPKGVAICNQCVDECYKLLHEKEERKKGAPVKVEKLPTPKEIKEFLDQYVIGQEEAKKVLSVAVYNHYKRIMSGGNVDDVELEKSNILLIGPTGSGKTLLARSLAKLLDVPFAIADATTLTEAGYVGEDVENILLRLIQAADYDIEKAERGIIYIDEIDKIARKSENPSITRDVSGEGVQQALLKILEGTIANVPPQGGRKHPHQQYIQIDTSNILFICGGAFVGLEDIIARRIGKGAMGFTADVDKKKMERDELLKHVEPDDLVKFGLIPELIGRLPVIATLKELTEEDLVRVLTEPKNALVKQYKKMLELEGVELEFTEDALREIAREAIRRKTGARGLRAIMEKIMTDVMFEVPTRKDIKKVIIDAESVKTGKPKYELTKAS

SEQ ID NO: 2715 - protein, 472 aa, unidentified
  REGION 1..472: note = Category: MG90 effectors
  REGION 1..472: note = Description: MG90-38 effector
  source 1..472: note = uncultivated organism sequence
MSDYLDKNTEEKDKDKEYEDICYVCRRPESKAGKMIHLPINNICVCADCMQKSFDTMNKGGFNYSDMMNLNQLNNLNFQELLGMPVMNSGEDPIPQSQKLKKKKPKEEQAPALDIRDIPKPHVIKAQLDDYIIGQEYAKKVVSVAVYNHYKRVATNTMDDIEIEKSNMLMIGPTGCGKTYLVRTLAKLLDVPLAITDATTLTEAGYIGDDVESVVSKLLANADNDVEKAERGIIFIDEIDKIAKKKNTTSRDVSGESVQQGLLKLLEGSDIEVPVGASSKNAMVPMTTVNTRNILFICGGAFPDLENIIKERLTKQSSIGFIADLKDKYDNEENLISKVTIEDLRKFGMIPEFIGRLPVIFTLQGLTKDMLVKILKEPKNAILKQYQKLLALDEVDLQFEDGALEAIAEKALEKKTGARALRSIIEEFMLDIMYEIPKDDNIGRVTITRDYIENTGGPRIEMRGASALPMHS

SEQ ID NO: 2716 - protein, 406 aa, unidentified
  REGION 1..406: note = Category: MG90 effectors
  REGION 1..406: note = Description: MG90-39 effector
  source 1..406: note = uncultivated organism sequence
MAKNNEYCCMCGSRKDEVEKLIRGKYGYICDSCISIASDLINDEEEESITNNMQLATPSQIKAHLDQYVIGQDEAKRTLAVAVYNHYKRLKQNKKSDVEIQKSNILMIGSTGSGKTYLAQSLAKFLGVPFAITDATTLTEAGYVGDDVEVMLRTLLQNANYDIESAQRGIIYIDEIDKISRKGENMSITRDVSGEGVQQALLKIIEGTISEVPVTGSRKHPQADTIKIDTSNILFICGGAFDGIDKIIGKEETHNSIGFGANVTDKKESVADLSKVEQHDLVKYGLMPELIGRLPIITALNPLSEDDLVRILTDPKNAITKQYQELLSMDGIKLEFEDEALRKIAELAIKKKTGARGLRSIIESAMQKVMFDVPDMSSAKKVVVTAACVEGKADALVYGARNKKIA

SEQ ID NO: 2717 - protein, 418 aa, unidentified
  REGION 1..418: note = Category: MG90 effectors
  REGION 1..418: note = Description: MG90-40 effector
  source 1..418: note = uncultivated organism sequence
MEERDIIVSMTAAGNNNQTVRYNYRLYPTKTQEAVLNRLFGCCRVVYNDTIDFFNNNFNPNNQSKLPTAANASKQILTNAKKTTKRAFLKEVSSVALQQELRNAWLACLHGVSHSSNQKPAKRKTKKHNPVNSANFTSNGFSINQHGVYISKIGVIKTKWSRPMPSEPTSCTISHARNGRWYASFVVKRPKTPFAQCDNNAGIDMGLTDMATIVNTKGKRWKIENPRNYAKIQDKIGRLQRHLSKQTKGSKRYERTRHQIALLYSKAHDALADYQWKNVLNIIRETQAIGVETLDIKSMAVKHGKSVRDASMRSFLNKLGSKADEHCRVIIQLNQWLVTTKVCALCKHKLKVGLPEYARHWVCPKCGAHLDRDYNAALNILDAAGLAGSLNARGGSVRSFLVSAENGCSRGTAYHPNF

SEQ ID NO: 2718 - protein, 439 aa, unidentified
  REGION 1..439: note = Category: MG90 effectors
  REGION 1..439: note = Description: MG90-41 effector
  source 1..439: note = uncultivated organism sequence
MIDWGLQQHVTSKLTVPKPKDIKAKLDEYIVKQDHAKKVLAVAVHNHYKRIMSPAKDGIELGKSNILLIGPTGTGKTLLAQTLAKILDVPFAMADATSLTEAGYVGDDVENVVLNLVNAADGDIERACRGIIYIDEIDKIAKKGENPSITRDVSGEGVQQSLLKMIEGTVAAVPPKGGRKHPQQEFLRVDTTNILFICGGAFVGLADIIDKRTSLGSMGFNANVVNKDKRDLSALYHALEPEDLLKFGLIPELVGRLPVVATLEPLDEAALTEILTEPKNSLVKQYKKMFKIDGVDLEFDDDALAEIAKLAIKKESGARGLRSILENAMMPFLYAVPGMPNMKKLVITRDIIAKQGDLSQIDELNARYNAKQDDKSSNASTKTSDAESDDATSDDAKSGSDQSDDKSISSDDTIDDKSSNADDKKAKSARAKKTKKTDP

SEQ ID NO: 2719 - protein, 442 aa, unidentified
  REGION 1..442: note = Category: MG90 effectors
  REGION 1..442: note = Description: MG90-42 effector
  source 1..442: note = uncultivated organism sequence
MAENKDMTPDNSVEEKETIVCDFCGRRQKDPKDPVYGSRDGKSWICGECISTIHKVMNTKDTTVERIKAGAAASSPQKINIGTPAKIKAYLDQYIEGQEYAKRVLSVAVYNHYKMLKIKHRQEKSGEPPKVELEKANTIIIGPTGCGKTAIIRHLAKKLGVPFIITDATLYTSSGYVGSDVETIIRDLVKAAGGDVEAAQRGIVYIDEIDKTGRKGENLSTTSDPGHEGAQQALLKLLEGTMLEVPVGNNRKHPNAETFMVNTENILFIIGGSFEGIEKIIAKRLRDESGAGKIGFGSKLVDEKNKLFNEYIEKVTVDDLKKFGMLPELLGRVPVVAPMKELTEDQLMSILYRPKNALVKQYQELFAHDGVTLTVTEGAMRAIAQMAIRRKTGARGLRGIMETILNPVMFELPERSENAVLVDVVDGKINVAYEDKEEREAV

SEQ ID NO: 2720 - protein, 448 aa, unidentified
  REGION 1..448: note = Category: MG90 effectors
  REGION 1..448: note = Description: MG90-43 effector
  source 1..448: note = uncultivated organism sequence
MFDKKKTDDLRCSICGRHKNDTEVLVDTGQGILICDRCVKGLMKAMGIEAPAKSPADATAATGSEAAAAGEKKTAQEPAAPELEGKLPTPQELYAHLNNYVIGQEKAKRVLSVAVYNHYKRLRHANDDGVELSKSNVLLVGPTGSGKTLLAQTLARGLNVPFAIADATTLTEAGYVGEDVENIIHKLLQAADGNVERAQRGIVYLDEIDKIARKSENPSITRDVSGEGVQQALLKLVEGTLCNVPAAGGRKNPRGQMIAVDTSNILFICGGAFDGLEKIVRRRSVKSGIGFSAQVKSEKEASLSELLQDVEPSDLVKYGLIPELVGRLPVIAVLQELTEEGFVSILTEPKNALIKQFKELFAMEGVELEVTADALKAIAHKAMERKTGARGLRSIVEAALLDAMFEVPAKPEIGRVVLDKATIETGAPVDMIACPRKDPVKPEASQAS

SEQ ID NO: 2721 - protein, 413 aa, unidentified
  REGION 1..413: note = Category: MG90 effectors
  REGION 1..413: note = Description: MG90-44 effector
  source 1..413: note = uncultivated organism sequence
MNKVNDKMQKCSFCGAMASESDDNVLIQSENENSFICIDCIDTISLKMQKFKKKKAAIMSKKNLELSSLTPKRIKQFLDDYIIGQEEAKKIISVAVYNHYKSISIKERDPEIELEKSNIIMLGPSGCGKTAVVKALSKMLNVPFAIADASTLTAAGYVGSDVEVVLQRLLSSADNNVEEAQKGIVYIDEIDKISRKGENLSTTADPGHEEVQQALLKIIEGSIVDVPQKGNRKHPHGENIKMDTSNILFIVGGAFEGIEKIVAKRQKKGKTKIGFGSELKDDEKTYNELVNNVKVEDLKKFGMIPELLGRLPIICTMKELDENALIKILTEPKNALIKQYKRLLQEDGVELNVSDLALKAIANRAKERKTGARSLRSILEEILNPTMFDLPEKEVNQITLDINNNDFVVNYNK

SEQ ID NO: 2722 - protein, 407 aa, unidentified
  REGION 1..407: note = Category: MG90 effectors
  REGION 1..407: note = Description: MG90-45 effector
  source 1..407: note = uncultivated organism sequence
MANKNNEFCCMCGSKKDEVDKLIRGKYGYICDSCISIANDLLNDEEEESITNNMQLGTPSQIKAHLDQYVIGQDEAKRTLAVAVYNHYKRLKQNKKSDVEIQKSNILMIGSTGSGKTYLAQSLAKFLGVPFAIADATTLTEAGYVGDDVEVMLRTLLQNANYDIQAAQRGIIYIDEIDKISRKGENMSITRDVSGEGVQQALLKIIEGTVSEVPVTGSRKHPQAETIKIDTSNILFICGGAFDGIDKIIGKEETHNSIGFGANVADKKESITDLSKVEQHDLVKYGLMPELIGRLPIITALNPLSEDDLVHILTEPKNAITKQYQELLSMDGVKLEFEDEALRKIAELAIQKKTGARGLRSIIESAMQKVMFDVPDMSSAKKVVVTAACVEGKADALVYGARNKKIA

SEQ ID NO: 2723 - protein, 448 aa, unidentified
  REGION 1..448: note = Category: MG90 effectors
  REGION 1..448: note = Description: MG90-46 effector
  source 1..448: note = uncultivated organism sequence
MFDKKKTDDLRCSICGRHKNDTEVLVDTGQGILICDRCVKGLMKAMGIEAPAKSPADATAATGSEAAAAGEKKTAQEPAAPELEGKLPTPQELYAHLNNYVIGQEKAKRVLSVAVYNHYKRLRHANDDGVELSKSNVLLVGPTGSGKTLLAQTLARGLNVPFAIADATTLTEAGYVGEDVENIIHKLLQAADGNVERAQRGIVYLDEIDKIARKSENPSITRDVSGEGVQQALLKLVEGTLCNVPAAGGRKNPRGQMIAVDTSNILFICGGAFDGLEKIVRRRSVKFGIGFSAQVKSEKEASLSELLQDVEPSDLVKYGLIPELVGRLPVIAVLQELTEEGFVSILTEPRNALIKQFKELFAMEGVELEVTADALKAIAHKAMERKTGARGLRSIVEAALLDAMFEVPAKPEIGRVVLDKATIETGAPVDMIACPRKDPVKPEASQAS

SEQ ID NO: 2724 - protein, 361 aa, unidentified
  REGION 1..361: note = Category: MG90 effectors
  REGION 1..361: note = Description: MG90-47 effector
  source 1..361: note = uncultivated organism sequence
MHDSQGNRLRFEDLPKPAEIKAKLDEYIVGQDRAKVVLSVAVYNHYKRILYAGDNDVELQKSNILLIGPTGSGKTLFAQSLAKMLNVPFAIADATTLTEAGYVGEDVENILLRLLQAADFDVERAEKGIIYIDEIDKIARKSENTSITRDVSGEGVQQALLKLLEGTVANVPPQGGRKHPHQEFIKVDTTNILFICGGAFDGLDKIIEKRTEKKSMGFGADIKSSTERDVGELLKQAQQHDLLKFGIIPELIGRLPVIAPLTSLKREDLVRILTEPKNAMTKQYEALMAYDGVELVYEKDALEAVADKAIEMKIGARGLRSVMEGIMTDIMYTVPSEHDIEKVIVTADCVKNGTGPDVIRK

SEQ ID NO: 2725 - protein, 442 aa, unidentified
  REGION 1..442: note = Category: MG90 effectors
  REGION 1..442: note = Description: MG90-48 effector
  source 1..442: note = uncultivated organism sequence
MSDTKERCSFCGKEESDDRLLIGSEDGCAFICKHCFDRLKDEFADETLLKEESLNWKDLTPSKIKSYLDKYIIGQDRAKKVLSVAVYNHYKMLDYAKQQSDVELEKSNIIMVGPTGVGKTAIIKALAKILNVPFAITDATTLTENGYVGADPECCVQRLLYAADGDVDKTETGIIYIDEIDKIACKGENMSITRDVSGEGVQQALLKIIEGTIVDVPEKGVRKHPNAETIRVDTSKILFIVGGAFPGLEKIIKKRKKISNKAKIGFADGNAEKTAEEVTYNEVIDDVSPEDLKKFGIIAELLGRLPIITPLHELTEDQLCQILTEPKNALVRQYTEIFKYDDTDLVFEKDALKSIAARAIKNGTGARGLRAILESLLLDKMYEIPDLKQKNTLTITKQYVESKNAKEVSKHNGTGKQTVSTVLRRRQKPGESGTGCPDVAKS

SEQ ID NO: 2726 - protein, 373 aa, unidentified
  REGION 1..373: note = Category: MG90 effectors
  REGION 1..373: note = Description: MG90-49 effector
  source 1..373: note = uncultivated organism sequence
MVSNAPEPEEEIIDLPKPSEIKAYLDQYVIGQEEAKMIISVAVYNHYKRIFSQKKDDDIDLEKSNILMIGPTGCGKTLIAETLARFLKVPFAISDATTLTEAGYVGEDVENILVRLLQAADYDVAKAEKGIVYIDEIDKISRKSETPSITRDVSGEGVQQALLKILEGTKVNVPPKGGRKHPQQDFIEMDTKNILFIAGGAFFGLEKIIKERIDKKAIGFDVKLGTNIDEANIFDQTISQDLLKYGLIPELIGRMPVLCTLHELTEEALVEILVKPKNALCSQYKKYFELDGVELEFGEDALREIARIAINQKTGARGLRSIMEKFMLKIMYNIPDLDNIRSCHITADVVSKGEEPEFVFSSKSSNKRAAITR

SEQ ID NO: 2727 - protein, 394 aa, unidentified
  REGION 1..394: note = Category: MG90 effectors
  REGION 1..394: note = Description: MG90-50 effector
  source 1..394: note = uncultivated organism sequence
MKYCTVLEWCRSRKRDSEQAPKDLEDIRLMPPTEIKKVLDEYVIGQDMAKISLAVSVYNHYKRILSQEDDEDEVELQKSNVLLLGPTGVGKTFLAQTLAKILDVPFAIADATTITEAGYVGDDVENVLLRLLQAADFDVEAAERGIIYIDEIDKISRKSENVSLTRDVSGEGVQQALLKIVEGTVSNVPPQGGRKHPNQECIQVNTKNILFICGGAFDGLEKIIQKRQSPSGLGFGAPVAQSKKELSNIFRQAIPQDLVKFGLVPELVGRLPVITTLDDLDEDALIRILTEPKNALVKQYQKLFSYDEIELELEPNALRGIAKKAIERKTGARGLRSIMEGILMETMYQVPQMESVARVVITADCVEGTKKPTLLAKDGTEIPYPESESKAINA

SEQ ID NO: 2728 - protein, 359 aa, unidentified
  REGION 1..359: note = Category: MG90 effectors
  REGION 1..359: note = Description: MG90-51 effector
  source 1..359: note = uncultivated organism sequence
MTPAEIKDGLDQYVIGQDEAKRVLSVSVYNHYKRILSGKGGDVELQKSNVLLLGPSGVGKTLLAQTLAKMLGVPFAIADATTLTEAGYVGEDVENILLKLIQAADFDVQKAQIGIIYIDEIDKITRKSENPSITRDVGGEGVQQALLKILEGTVSNVPPQGGRKHPQQEFIQIDTTNILFICGGAFDGLDKYILRRTDKSALGFGSSLKDNSSEAERALLRKVEPHDLVKFGLIPELIGRLPVITVLDDLDEDALVRVLKEPRNSLVKQYKELLGMDNVELTFTDEALHAIARKTIERKTGARGLRSVMESILLPIMYEVPSDATIIRVTVDEDTVEGGEAHLEYGAVRKRYKNQVALS

SEQ ID NO: 2729 - protein, 448 aa, unidentified
  REGION 1..448: note = Category: MG90 effectors
  REGION 1..448: note = Description: MG90-52 effector
  source 1..448: note = uncultivated organism sequence
MFDKKKTDDLRCSICGRHKNDTEVLVDTGQGILICDRCVKGLMKAMGIEAPAKSPADATAATGSEAAAAGEKKTAQEPAAPELEGKLPTPQELYAHLNNYVIGQEKAKRVLSVAVYNHYKRLRHANDDGVELSKSNVLLVGPTGSGKTLLAQTLARGLNVPFAIADATTLTEAGYVGEDVENIIHKLLQAADGNVERAQRGIVYLDEIDKIARKSENPSITRDVSGEGVQQALLKLVEGTLCNVPAAGGRKNPRGQMIAVDTSNILFICGGAFDGLEKIVRRRSVKSGIGFSAQVKSEKEASLSELLQDVEPSDLVKYGLIPELVGRLPVIAVLQELTEEGFVSILTEPRNALIKQFKELFAMEGVELEVTADALKAIAHKAMERKTGARGLRSIVEAALLDAMFEVPAKPEIGRVVLDKATIETGAPVDMIACPRKDPVKPEASQAS

SEQ ID NO: 2730 - protein, 377 aa, unidentified
  REGION 1..377: note = Category: MG90 effectors
  REGION 1..377: note = Description: MG90-53 effector
  source 1..377: note = uncultivated organism sequence
MKSAQEPAAPELEGKLPTPQELYAHLNNYVIGQEKAKRVLSVAVYNHYKRLRHANDDGVELSKSNVLLVGPTGSGKTLLAQTLARGLNVPFAIADATTLTEAGYVGEDVENIIHKLLQAADGNVERAQRGIVYLDEIDKIARKSENPSITRDVSGEGVQQALLKLVEGTLCNVPAAGGRKNPRGQMIAVDTSNILFICGGAFDGLEKIVRRRSVKSGIGFSAQVKSEKEASLSELLQDVEPSDLVKYGLIPELVGRLPVIAVLQELTEEGFVSILTEPRNALIKQFKELFAMEGVELEVTAGALKAIAHKAMERKTGARGLRSIVEAALLDAMFEVPAKPEIGRVVLDKATIETGAPVDMIACPRKDPVKPEASQAS

SEQ ID NO: 2731 - protein, 407 aa, unidentified
  REGION 1..407: note = Category: MG90 effectors
  REGION 1..407: note = Description: MG90-54 effector
  source 1..407: note = uncultivated organism sequence
MANKNNEYCYMCGSKKDEVDKLIRGKYGYICDSCISIASELLNDEEEESITNNMQLATPSQIKAHLDQYVIGQDEAKRTLAVAVYNHYKRLKQNKKSDVEIQKSNILMIGSTGSGKTLIAQSLAKFLGVPFAIADATTLTEAGYVGSDVETMLRTLLQNADYDIQAAQRGIIYIDEIDKISRKSENVSITRDVSGEGVQQALLKIIEGTVSEVPVTGGRKHPQAETIKIDTSNILFICGGAFDGIDKIIGKEETHNSIGFGANVSDKKESVTDLSKVEQHDLVKYGLMPELIGRLPIITALNPLSEEDLVHILTEPKNAITKQYQELLSMDGVKLEFEDEALRKIAELAIKKKTGARGLRSIIEGSMQKIMFEIPDMSIAKKVVVTAACVEGKADALVYGARNKKIA

SEQ ID NO: 2732 - protein, 448 aa, unidentified
  REGION 1..448: note = Category: MG90 effectors
  REGION 1..448: note = Description: MG90-55 effector
  source 1..448: note = uncultivated organism sequence
MFDKKKTDDLRCSICGRHKNDTEVLVDTGQGILICDRCVKGLMKAMGIEAPAKSPADATAATGSEAAAAGEKKTAQEPAAPELEGKLPTPQELYAHLNNYVIGQEKAKRVLSVAVYNHYKRLRHANDDGVELSKSNVLLVGPTGSGKTLLAQTLARGLNVPFAIADATTLTEAGYVGEDVENIIHKLLQAADGNVERAQRGIVYLDEIDKIARKSENPSITRDVSGEGVQQALLKLVEGTLCNVPAAGGRKNPRGQMIAVDTSNILFICGGAFDGLEKIVRRRSVKSGIGFSAQVKSEKEESLSELLQDVEPSDLVKYGLIPELVGRLPVIAVLQELTEEGFVSILTEPRNALIKQFKELFAMEGVELEVTADALKAIAHKAMERKTGARGLRSIVEAALLDAMFEVPAKPEIGRVVLDKATIETGAPVDMIACPRKDPVKPEASQAS

SEQ ID NO: 2733 - protein, 448 aa, unidentified
  REGION 1..448: note = Category: MG90 effectors
  REGION 1..448: note = Description: MG90-56 effector
  source 1..448: note = uncultivated organism sequence
MFDKKKTDDLRCSICGRHKNDTEVLVDTGQGILICDRCVKGLMKAMGIEAPAKSPADATAATGSEAAAAGEKKTAQEPAAPELEGKLPTPQELYAHLNNYVIGQEKAKRVLSVAVYNHYKRLRHANDDGVELSKSNVLLVGPTGSGKTLLAQTLARGLNVPFAIADATTLTEAGYVGEDVENIIHKLLQAADGNVERAQRGIVYLDEIDKIARKSENPSITRDVSGEGVQQALLKLVEGTLCNVPAAGGRKNPRGQMIAVDTSNILFICGGAFDGLEKIVRRRSVKSGIGFSAQVKSEKEASLSELLQDVEPSDLVKYGLIPELVGRLPVIAVLQELTEEGFVSILTEPRNALIKQFKELFAMEGVELEVTAGALKAIAHKAMERKTGARGLRSIVEAALLDAMFEVPAKPEIGRVVLDKATIETGAPVDMIACPRKDPVKPEASQAS

SEQ ID NO: 2734 - protein, 411 aa, unidentified
  REGION 1..411: note = Category: MG90 effectors
  REGION 1..411: note = Description: MG90-57 effector
  source 1..411: note = uncultivated organism sequence
MFETKVPLRRCSFCGRDQTKVEALITGPGGVAICNYCIDECYEMIHQEREKKENSPVSIDRLPTPREIKEFLDQYVIGQDEAKKVLSVAVYNHYKRIMSGKDTDDVEIEKSNILLIGPTGSGKTLLARSLAKLLDVPFAIADATTLTEAGYVGEDVENILLRLIQAADYDIEKAERGIIYIDEIDKISRKSENPSITRDVSGEGVQQALLKILEGTIANVPPQGGRKHPHQQYIQIDTTNILFICGGAFVGLEDIIARRIGKGSMGFTADVDKKKLNRDELLKHVEPDDLVKFGLIPELIGRLPVIATLSELKEEDLVRVLKEPKNSLVKQYKKLLELEGVELEFTDDALRAIAKEAIRRKTGARGLRAIMEKIMTDVMFEVPTRKDVRKVIIDAESVKTGKPKYELVKAS

SEQ ID NO: 2735 - protein, 474 aa, unidentified
  REGION 1..474: note = Category: MG90 effectors
  REGION 1..474: note = Description: MG90-58 effector
  source 1..474: note = uncultivated organism sequence
MKDYEEVKDTKDITEETEHKDDYEDVCYLCRRPESKAGKLIRLPMEGICICPDCMQRSFTMMGNTNINYEDLMKNMNLQDMFPGNIQDGIPKSQRLKKKKPKEKNEPVIDLKQILPPHQIKARLDDYVIGQDYAKKVMSVAVYNHYKRVATNTMDEIEIEKSNMLMIGPTGCGKTYLVRTLARLLDVPLAIADATSLTEAGYIGDDIESVVSKLLAAADNDVEKAERGIIFIDEIDKIAKKKNTTSRDVSGESVQQGLLKLLEGSDVEVPVGASSKNAMVPLTTVNTRNILFICGGAFPDLDGIIKARLNKTSGIGFGAMLSDAHDQDSDIVSQVTIDDLREFGMIPEFIGRLPVIFTLKGLDEAALVKILKEPKNAIIKQYQKLLALDEVDLQFDDGALEAIAKRAIEKKTGARALRSIIEELMLDIMYQIPKDDNIGRVTITQPYVEHRGGPLIEMRGIFSLPNKTPVAGIE

SEQ ID NO: 2736 - protein, 448 aa, unidentified
  REGION 1..448: note = Category: MG90 effectors
  REGION 1..448: note = Description: MG90-59 effector
  source 1..448: note = uncultivated organism sequence
MFDKKKTDDLRCSICGRHKNDTEVLVDTGQGILICDRCVKGLMKAMGIEAPAKSPADATAATGSEAAAAGEKKTAQEPAAPELEGKLPTPQELYAHLNNYVIGQEKAKRVLSVAVYNHYKRLRHANDDGVELSKSNVLLVGPTGSGKTLLAQTLARGLNVPFAIADATTLTEAGYVGEDVENIIHKLLQAADGNVERAQRGIVYLDEIDKIARKSENPSITRDVSGEGVQQALLKLVEGTLCNVPAAGGRKNPRGQMIAVDTSNILFICGGAFDGLEKIVRRRSVKSGIGFSAQVKSEKEESLSELLQDVEPSDLVKYGLIPELVGRLPVIAVLQELTEEGFVSILTEPRNALIKQFKELFAMEGVELEVTSGALKAIAHKAMERKTGARGLRSIVEAALLDAMFEVPAKPEIGRVVLDKATIETGAPVDMIACPRKDPVKPEASQAS

SEQ ID NO: 2737 - protein, 448 aa, unidentified
  REGION 1..448: note = Category: MG90 effectors
  REGION 1..448: note = Description: MG90-60 effector
  source 1..448: note = uncultivated organism sequence
MFDKKKTDDLRCSICGRHKNDTEVLVDTGQGILICDRCVKGLMKAMGIEAPAKSPADATAATGSEAAAAGEKKTAQEPAAPELEGKLPTPQELYAHLNNYVIGQEKAKRVLSVAVYNHYKRLRHANDDGVELSKSNVLLVGPTGSGKTLLAQTLARGLNVPFAIADATTLTEAGYVGEDVENIIHKLLQAADGNVERAQRGIVYLDEIDKIARKSENPSITRDVSGEGVQQALLKLVEGTLCNVPAAGGRKNPRGQMIAVDTSNILFICGGAFDGLEKIVRRRSVKSGIGFSAQVKSEKEESLSELLQDVEPSDLVKYGLIPELVGRLPVIAVLQELTEEGFVSILTEPRNALIKQFKELFAMEGVELEVTAGALKAIAHKAMERKTGARGLRSIVEAALLDAMFEVPAKPEIGRVVLDKATIETGAPVDMIACPRKDPVKPEASQAS

SEQ ID NO: 2738 - protein, 448 aa, unidentified
  REGION 1..448: note = Category: MG90 effectors
  REGION 1..448: note = Description: MG90-61 effector
  source 1..448: note = uncultivated organism sequence
MFDKKKTDDLRCSICGRHKNDTEVLVDTGQGILICDRCVKGLMKAMGIEAPAKSPADATAATGSEAAAAGEKKTAQEPAAPELEGKLPTPQELYAHLNNYVIGQEKAKRVLSVAVYNHYKRLRHANDDGVELSKSNVLLVGPTGSGKTLLAQTLARGLNVPFAIADATTLTEAGYVGEDVENIIHKLLQAADGNVERAQRGIVYLDEIDKIARKSENPSITRDVSGEGVQQALLKLVEGTLCNVPAAGGRKNPRGQMIAVDTSNILFICGGAFDGLEKIVRRRSVKSGIGFSAQVKSEKEASLSELLQDVEPSDLVKYGLIPELVGRLPVIAVLQELTEEGFVSILTEPRNALIKQFKELFAMEGVELEVTAGALKAIAHKAMERKTGARGLRSIVEAALLDAMFEVPAKPEIGRVVLDKATIETGAPVDMIVCPRKDPVKPEASQAS

SEQ ID NO: 2739 - protein, 448 aa, unidentified
  REGION 1..448: note = Category: MG90 effectors
  REGION 1..448: note = Description: MG90-62 effector
  source 1..448: note = uncultivated organism sequence
MFDKKKTDDLRCSICGRHKNDTEVLVDTGQGILICDRCVKGLMKAMGIEAPAKSPADATAATGSEAAAAGEKKTAQEPAAPELEGKLPTPQELYAHLNNYVIGQEKAKRVLSVAVYNHYKRLRHANDDGVELSKSNVLLVGPTGSGKTLLAQTLARGLNVPFAIADATTLTEAGYVGEDVENIIHKLLQAADGNVERAQRGIVYLDEIDKIARKSENPSITRDVSGEGVQQALLKLVEGTLCNVPAAGGRKNPRGQMIAVDTSNILFICGGAFDGLEKIVRRRSVKSGIGFSAQVKSEKEASLSELLQDVEPSDLVKYGLIPELVGRLPVIAVLQELTEEGFVSILTEPRNALIKQFKELFAMEGVELEVTADALKAIAHKAMERKTGARGLRSIVEAALLDAMFEVPAKPEIGRVVLDKATIETGAPVDMIACPRKDPVKPEASQAF

SEQ ID NO: 2740 - protein, 448 aa, unidentified
  REGION 1..448: note = Category: MG90 effectors
  REGION 1..448: note = Description: MG90-63 effector
  source 1..448: note = uncultivated organism sequence
MFDKKKTDDLRCSICGRHKNDTEVLVDTGQGILICDRCVKGLMKAMGIEAPAKSPADATVATGSEAAAAGEKKTAQEPAAPELEGKLPTPQELYAHLNNYVIGQEKAKRVLSVAVYNHYKRLRHANDDGVELSKSNVLLVGPTGSGKTLLAQTLARGLNVPFAIADATTLTEAGYVGEDVENIIHKLLQAADGNVERAQRGIVYLDEIDKIARKSENPSITRDVSGEGVQQALLKLVEGTLCNVPAAGGRKNPRGQMIAVDTSNILFICGGAFDGLEKIVRRRSVKSGIGFSAQVKSEKEASLSELLQDVEPSDLVKYGLIPELVGRLPVIAVLQELTEEGFVSILTEPRNALIKQFKELFAMEGVELEVTADALKAIAHKAMERKTGARGLRSIVEAALLDAMFEVPAKPEIGRVVLDKATIETGAPVDMIACPRKDPVKPEASQAS

SEQ ID NO: 2741 - protein, 448 aa, unidentified
  REGION 1..448: note = Category: MG90 effectors
  REGION 1..448: note = Description: MG90-64 effector
  source 1..448: note = uncultivated organism sequence
MFDKKKTDDLRCSICGRHKNDTEVLVDTGQGILICDRCVKGLMKAMGIEAPAKSPADATAATGSEAAAAGEKKTAQEPAAPELEGKLPTPQELYAHLNNYVIGQEKAKRVLSVAVYNHYKRLRHANDDGVELSKSNVLLVGPTGSGKTLLAQTLARGLNVPFAIADATTLTEAGYVGEDVENIIHKLLQAADGNVERAQRGIVYLDEIDKIARKSENPSITRDVSGEGVQQALLKLVEGTLCNVPAAGGRKNPRGQMIAVDTSNILFICGGAFDGLEKIVRRRSVKSGIGFSAQVKSEKEESLSELLQDVEPSDLVKYGLIPELVGRLPVIAVLQELTEEGFVSILTEPRNALIKQFKELFAMEGVELEVTAGALKAIAHKAMERKTGARGLRSIVEAALLDAMFEVPAKPEIGRVVLDKATIETGAPVDMIVCPRKDPVKPEASQAS

SEQ ID NO: 2742 - protein, 448 aa, unidentified
  REGION 1..448: note = Category: MG90 effectors
  REGION 1..448: note = Description: MG90-65 effector
  source 1..448: note = uncultivated organism sequence
MFDKKKTDDLRCSICGRHKNDTEVLVDTGQGILICDRCVKGLMKAMGIEAPAKSPAAASAATGSEAVAAGEMKSAQEPAAPELEGKLPTPQELYAHLNNYVIGQEKAKRVLSVAVYNHYKRLRHANDDGVELSKSNVLLVGPTGSGKTLLAQTLARGLNVPFAIADATTLTEAGYVGEDVENIIHKLLQAADGNVERAQRGIVYLDEIDKIARKSENPSITRDVSGEGVQQALLKLVEGTLCNVPAAGGRKNPRGQMIAVDTSNILFICGGAFDGLEKIVRRRSVKSGIGFSAQVKSEKEESLSELLQDVEPSDLVKYGLIPELVGRLPVIAVLQELTEEGFVSILTEPRNALIKQFKELFAMEGVELEVTAGALKAIAHKAMERKTGARGLRSIVEAALLDAMFEVPAKPEIGRVVLDKATIETGAPVDMIACPRKDPVKPEASQAF

SEQ ID NO: 2743 - protein, 428 aa, unidentified
  REGION 1..428: note = Category: MG90 effectors
  REGION 1..428: note = Description: MG90-66 effector
  source 1..428: note = uncultivated organism sequence
MAKQEPQHIKCSLCQRDITVHDQYDLPIYDPRSGFAICKSCIREIYHFIEENDHQEAIVQQKDFAMTLDAKLAKIKPHIIKQYLDEYIINQERAKKILSVAVYNHYKRMKYCYLHEDETEIEKSNVIMLGPSGCGKTALLSHLATLLDIPFAVTDASSLTEAGFVGADVEVAVRNLYYAADKNTEKAEHGIIYLDEFDKIARKSGENNSITADPGHEGVQQALLKMLEGSVVEFTARGQRKHPEAPTIKVDTRNILFIVGGAFVGIEKIIAKRLKNTDTNIGFGAKVPSKEEKPKFDELIHKVRPEDLMKFGIIPEIIGRLPVICTLETLDEDALLRILTEPKNAPVKQYEKLLAMDNVQLEFSDTALRAVARKAIERKTGARSLKGIIEDVMLDIMFDIPKSDAKRKVTITEECLEKGENPKIEEIA

SEQ ID NO: 2744 - protein, 372 aa, unidentified
  REGION 1..372: note = Category: MG90 effectors
  REGION 1..372: note = Description: MG90-67 effector
  source 1..372: note = uncultivated organism sequence
MVSNAPEPEEEIIDLPKPSEIKAYLDQYVIGQEEAKMIISVAVYNHYKRIFSRKDDDIDLEKSNILMIGPTGCGKTLIAETLARFLKVPFAISDATTLTEAGYVGEDVENILVRLLQAADYDVAKAEKGIVYIDEIDKISRKSETPSITRDVSGEGVQQALLKILEGTKVNVPPKGGRKHPQQDFIEMDTKNILFIAGGAFFGLEKIIKERIDKKAIGFDVKLGTNIDEANIFDQTISQDLLKYGLIPELIGRMPVLCTLHELTEEALVEILVKPKNALCSQYKKYFELDGVELEFGEDALREIARIAINQKTGARGLRSIMEKFMLKIMYNIPDLDNIRSCHITADVVSKGAEPEFVFSSKSSNKRAAITR

SEQ ID NO: 2745 - protein, 475 aa, unidentified
  REGION 1..475: note = Category: MG90 effectors
  REGION 1..475: note = Description: MG90-68 effector
  source 1..475: note = uncultivated organism sequence
MKDYEEEVKDTKDDAGENERKDDYEDICYMCRRPESKAGKLIHLPMEGICICPDCMQRSFTAMTNTNINYEDLMRNMNFQDMFPGNIQDGIPKSQRLKKKKPKENKEPAIDLKAILPPHQIKARLDDYVIGQDYAKKVMSVAVYNHYKRVATNTMDEIEIEKSNMLMIGPTGCGKTYLVRTLARLLDVPLAIADATSLTEAGYIGDDIESVVSKLLAAAGNDVEKAERGIIFIDEIDKIAKKKNTTSRDVSGESVQQGLLKLLEGSDVEVPVGASSKNAMVPLTTVNTRNILFICGGAFPDLEGIIKARLNKTSGIGFEAALNDAHDQDPEIMSQVTIDDLREFGMIPEFIGRLPVIFTLKGLDEKALVKILKEPKNAIIKQYQKLLALDEVDLQFDDEALEAIAKRAIQKKTGARALRSIIEELMLDIMYQIPKDDNIGRVTITEPYVEHTGGPLIEMRGVLTLPNKTPVAGIE

SEQ ID NO: 2746 - protein, 360 aa, unidentified
  REGION 1..360: note = Category: MG90 effectors
  REGION 1..360: note = Description: MG90-69 effector
  source 1..360: note = uncultivated organism sequence
MDSYVIGQDEAKKVLSVAVYNHYKRVLAGNDLDVELQKSNILMLGPTGSGKTYLAQTLAKILNVPFAIADATTLTEAGYVGEDVENILLKLIQAADYDIEKAQYGIVYIDEIDKITKKSENVSITRDVSGEGVQQALLKILEGTVASVPPQGGRKHPHQELLQIDTTNVLFICGGAFDGLEKIIENRMDQKAIGFNSEITDNTEMNNDALFGEVMPQDLVKFGIIPEFIGRVPVTVALKSLDENALVEILTKPKNAIVKQYEKLFELDGVKLTFTDEALKTIAKKSFERKTGARGLRAIMEQTVLDVMYETPSDETIEECIINEDVVNQLADPELKYKNNLDAKIKRANKKAKNEQIQPA

SEQ ID NO: 2747 - protein, 404 aa, unidentified
  REGION 1..404: note = Category: MG90 effectors
  REGION 1..404: note = Description: MG90-70 effector
  source 1..404: note = uncultivated organism sequence
MFSGIDGYICDDCVDRCSELLDDENYGWDKEEQFSDINLLKPKEIREFLDQYVIGQDAAKKVLSVAVYNHYKRITSGQKSEVEIQKSNILMLGPTGSGKTYLAQTLARLLNVPFAIADATTLTEAGYVGEDVENILLKLIQAADNNVARAEYGIIYIDEIDKISKKSENVSITRDVSGEGVQQALLKILEGTNASVPPQGGRKHPQQELIPINTTNILFICGGAFDGLEKIIERRLGSGGIGFNSEVVEKHSRGIDELFRQVMPQDLMKFGLIPELIGRVPVTVSLDLLDEDALVRILTEPKNALTKQYKSLFEMDGVKLEFTEDAIREVAHQAVERKTGARGLRAIMEDVMMDIMYEIPSDPSIGICTVTREAVLKQKQPEIVYRDLAAAGRPAGRVSGGVTA

SEQ ID NO: 2748 - protein, 448 aa, unidentified
  REGION 1..448: note = Category: MG90 effectors
  REGION 1..448: note = Description: MG90-71 effector
  source 1..448: note = uncultivated organism sequence
MFDKKKTDDLRCSICGRHKNDTEVLVDTGQGILICDRCVKGLMKAMGIEAPAKSPADATAATGSEAAAAGEKKTAQEPAAPELEGKLPTPQELYAHLNNYVIGQEKAKRVLSVAVYNHYKRLRHANDDGVELSKSNVLLVGPTGSGKTLLAQTLARGLNVPFAIADATTLTEAGYVGEDVENIIHKLLQAADGNVERAQRGIVYLDEIDKIARKSENPSITRDVSGEGVQQALLKLVEGTLCNVPAAGGRKNPRGQMIAVDTSNILFICGGAFDGLEKIVRRRSVKSGIGFSAQVKSEKEASLSELLQDVEPSDLVKYGLIPELVGRLPVIAVLQELTEEGFVSILTEPRNALIKQFKELFAMEGVELEVTADALKAIAHKAMERKTGARGLRSIVEAALLDAMFEVPAKPEIGRVVLDKATIETGAPVDMIVCPRKDPVKPEASQAS

SEQ ID NO: 2749 - protein, 379 aa, unidentified
  REGION 1..379: note = Category: MG90 effectors
  REGION 1..379: note = Description: MG90-72 effector
  source 1..379: note = uncultivated organism sequence
MDIIREEHKTTLVKSRDGVPTPRDICTVLDDYVIGQPHAKRVLSVAVHNHYKRLAHGQKNNDVEISKSNILLVGPTGCGKTLLAQTLARIIDVPFTMADATTLTEAGYVGEDVENIILRLLQAADYNVERAQRGIVYIDEVDKISRKSENPSITRDVSGEGVQQALLKIMEGTIASVPPQGGRKHPQQEFLQVDTTNILFICGGAFAGLEKIISQRSRGTSIGFGADVRGVDERQTGEILRGVEPEDLLKFGLIPEFIGRLPVIATLSDLDENTLVEILIRPKNALLKQYQRLFEMEGVHLEFADDALRSVARRAIAHKTGARGLRSIMEGILLDSMFELPTMSGVDEIVINREVVEGRASPLQIYADRRGDNVGGSSA

SEQ ID NO: 2750 - protein, 363 aa, unidentified
  REGION 1..363: note = Category: MG90 effectors
  REGION 1..363: note = Description: MG90-73 effector
  source 1..363: note = uncultivated organism sequence
MVSPTPVKAGAKAAKPAADSRKKLTPKAIHAYLDQYVIGQDRAKKVLSVAVYNHYKRLENNLDAIDSQVELEKSNILLAGPTGTGKTLLARTIARLLDVPFTIVDATVLTEAGYVGEDVESILSRLLEQADYDVARTERGIVFIDEIDKVARKSDNPSITRDVSGEGVQQAMLKLLEGNVVNVPPKGGRKHPEQDFVHINTQNILFICGGAFEGIERRIAQRLNTQVIGFDSAAKQQVDKENLLQYVSQEDFRAYGLIPEIIGRLPVITYLDPLDEDALKRILVEPKNALIKQYEKMFEMDGKKLVVEPEVLDFIVKTAVEKKIGARGLRSICEKIFTEAMYEAPSSQQAVYTVTLDFARKAI

SEQ ID NO: 2751 - protein, 442 aa, unidentified
  REGION 1..442: note = Category: MG90 effectors
  REGION 1..442: note = Description: MG90-74 effector
  source 1..442: note = uncultivated organism sequence
MMFQDPTTGTALCFSCAQKMMAMAAAKQRYENNGVSELEREQAAAAKLQLHREEAKQLFEIMSNESPAKIKAHLDKYIIGQDGAKKVLSVAVYNHYKRLAFFEAQKCKELETGKKIEGLAQLDKSNILMLGPTGVGKTAILKAIALYLGVPFTVVDSSTLTQSGYVGSDPETCVRQLWEEAGKDREKTERGIIFLDEFDKIARKSGTNRSTSADPGHEGVQQALLKIVEGTKVHFTLGNRKHPDAQTIEVDTTNILFVCGGAFEGIEKIIAKRVETGNGFGYTHVDKLGLDELKDEADRFNRLIEEATPDDVKEYGIIPEMLGRLPIMCKLHQLKENDLIRILTEPKNAIIKQFAVLFDMDGCRLKPDREALKEIARKAIKTGTGARSLRTIIEGILLDTMYDLPQISEQAAEGTKPVIHLTGEAVKTKKLSVEYVKAPMAA

SEQ ID NO: 2752 - protein, 411 aa, unidentified
  REGION 1..411: note = Category: MG90 effectors
  REGION 1..411: note = Description: MG90-75 effector
  source 1..411: note = uncultivated organism sequence
MFETNIPERRCSFCGRGQNEVEALITGPKGVAICNVCVDECYKMLHEKEEKRKGAPVKVDRLPTPKEIKEFLDQYVIGQEEAKKVLSVAVYNHYKRIMSGGTVDDVELEKSNILLIGPTGSGKTLLARSLAKLLDVPFAIADATTLTEAGYVGEDVENILLRLIQAADYDIEKAERGIIYIDEIDKIARKSENPSITRDVSGEGVQQALLKILEGTIANVPPQGGRKHPHQQYIQIDTSNILFICGGAFVGLEDIIARRIGKGAMGFTADVDKKKMERDELLKHVEPDDLVKFGLIPELIGRLPVIATLKELSEEDLVRVLTEPKNALVKQYKKMLELEGVELEFTEDALREIAREAIRRKTGARGLRAIMEKLMTDVMFEVPTRKDVKKVIIDAEAVKTGKPKYELTKAS

SEQ ID NO: 2753 - protein, 532 aa, unidentified
  REGION 1..532: note = Category: MG90 effectors
  REGION 1..532: note = Description: MG90-76 effector
  source 1..532: note = uncultivated organism sequence
MENYHKETHCSFCGKSESEVETIINGPNGMTICNECIETCEYILNKGKSADNSGLSLYTPKEIKAKLDEYIIGQDSAKRVLSVAVYNHYKRISQLGEKKKNDGVVIEKSNVLLLGPTGSGKTLLAKTLAQILNVPFAVADATTLTEAGYVGEDVENILLKLIQSANGDLKRAEIGIVYIDEYIIGQDSAKRVLSVAVYNHYKRISQLGEKKKNDGVVIEKSNVLLLGPTGSGKTLLAKTLAQILNVPFAVADATTLTEAGYVGEDVENILLKLIQSANGDLKRAEIGIVYIDEIDKIAKKGENVSITRDVSGEGVQQALLKIIEGTVANVPPQGGRKHPNQECYQLDTTNILFLCGGAFVDLDKIIDQRKDNSKLGFGSAVKGTVDYRYDELIEALQPADLIKYGLIPEFVGRVPIVVGLNALDENALVKILSEPKNALVKQYKYQFELDGVDLEFEDDALRAVAAKAIQLNTGARGLRAILEDVLLELMFEIPSDGDIEKVIVTKGAIEKTEKPIVVRAQGVKGETANNIA

SEQ ID NO: 2754 - protein, 412 aa, unidentified
  REGION 1..412: note = Category: MG90 effectors
  REGION 1..412: note = Description: MG90-77 effector
  source 1..412: note = uncultivated organism sequence
MFETKIPERRCSFCGRGQSEVEALITGPKGVAICNLCVDECYKMLHEESERKKKGAPVGVEKLPTPKEIKEFLDQYVIGQEEAKKVLSVAVYNHYKRIMSGGNVDDVELEKSNILLIGPTGSGKTLLARSLAKFLDVPFAIADATTLTEAGYVGEDVENILLRLIQAADYDIEKAERGIIYIDEIDKIARKSENPSITRDVSGEGVQQALLKILEGTIANVPPQGGRKHPHQQYIQIDTSNILFICGGAFVGLEDIIARRIGKGAMGFTADVDKKKMERDELLKHVEPDDLVKFGLIPELIGRLPVIATLKELKEEDLVRVLTEPKNALVKQYQKMLELEGVELEFTEDALREIAKEAIRRKTGARGLRAIMEKLMTDVMFEVPTRKDIKKVIIDAESVKTGKPKYELTKAS

SEQ ID NO: 2755 - protein, 350 aa, unidentified
  REGION 1..350: note = Category: MG90 effectors
  REGION 1..350: note = Description: MG90-78 effector
  source 1..350: note = uncultivated organism sequence
MKIPTPKELKAFLDEHVIGHDEVKKVLAVAVHNHYRRLEAAFSREANPEFADVEIEKSNILLIGPTGTGKTLLAKTLAKLLGVPFAIGDATVLTQAGYVGEDVENLVRYLYVNAGEDVQLAQTGIIYVDEIDKIASKTDNVSITRDVSGEGVQQALLKIIEGSTCRLPPKGGRKHPDQEYVEVDTRNILFICGGAFVGLDKIVAARTGKHTIGFGGEDSAQADSELIAKDVRPEDLVKFGLIPEFTGRLPIIATMGELTEDQLVDVLTKPKNALVKQYQKLLAMDGVKLEFEEDALRELAKMALKRKTGARGLRAEMERLMTDVMYEAPGNPKLKKVTVTAKLIKEKLCK

SEQ ID NO: 2756 - protein, 411 aa, unidentified
  REGION 1..411: note = Category: MG90 effectors
  REGION 1..411: note = Description: MG90-79 effector
  source 1..411: note = uncultivated organism sequence
MFETNIPERRCSFCGKAQSEVEALITGPKGVAICNQCVDECYKLLHEKEERKKGAPVKVEKLPTPKEIKEFLDQYVIGQEEAKKVLSVAVYNHYKRIMSGGNVDDVELEKSNILLIGPTGSGKTLLARSLAKLLDVPFAIADATTLTEAGYVGEDVENILLRLIQAADYDIEKAERGITYIDEIDKIARKSENPSITRDVSGEGVQQALLKILEGTIANVPPQGGRKHPHQQYIQIDTSNILFICGGAFVGLEDIIARRIGKGAMGFTADVDKKKMERDELLKHVEPDDLVKFGLIPELIGRLPVIATLKELTEEDLVRVLTEPKNALVKQYKKMLELEGVELEFTEDALREIAREAIRRKTGARGLRAIMEKIMTDVMFEVPTRKDIKKVIIDAESVKTGKPKYELTKAS

SEQ ID NO: 2757 - protein, 402 aa, unidentified
  REGION 1..402: note = Category: MG90 effectors
  REGION 1..402: note = Description: MG90-80 effector
  source 1..402: note = uncultivated organism sequence
MQTVRYNYRLYPTKTQETVLNRLFGCCRVVYNDTIDFFNNNFNPNNQSKLPTVSKASKQILTNAKKTTKRAFLKEVSSVALQQELRNAWLACLHGVSHSSNQKPAKRKTKKHNPVNSANFTGNSFIVKQHGVYIQKIGVIKTKWSRPMPSEPTSCTISHARNGRWYASFVVKRPKTPFAQCDNNAGIDMGLTDMATIVNTKGKRWKIANPRNYAKLQDKISRLQRHLSKQTKGSKRYERTRHQIALLYSKAHDALADYQWKNVLNIIRETQAIGVETLNIQGMTAKHGKSVRDAAMRSFLNKLGSKAEEHCRIIIQLNQWLATTKVCALCKHKLKAGIPEYARHWVCPNCGAHLDRDYNAALNILDAAGLAGSLNARGGGVRSFLASAENGCSRRTAYHPSF

SEQ ID NO: 2758 - protein, 394 aa, unidentified
  REGION 1..394: note = Category: MG90 effectors
  REGION 1..394: note = Description: MG90-81 effector
  source 1..394: note = uncultivated organism sequence
MEEGSADKGHVTIVYPAYPNVGQERELLRTLGVVRGLYNHFLAESIADVMEGDRFPTPREMNKAITVMRGRDIGLGSVAVFTLRDAPLRVHAAMTSFAKLSARSGELRLPRFKSESRYRSLAFDPKGVKFDGRRIVFGKWVKLRCGNLDRNRKLHRPEGGRIVTARIVRKGSGRWYVHITFEVDRRYRSEIDLSDPAEPEAYDLGLCDIITDSKGERIGAPDLYARHENEIARLQRQIASMEDGPKRRKKQRRLSVLHERIRRRRDGYLDEVADRMVSGHSAVILEDLRLRRMIERDDSPAPRRKLFTEAALGTLVRKVEAKAERACIPLVKVDPAYTTRRCSCCGHVGEKMPLSLRVFSCPRCGLEMDRDHNAALNILGSGMGTLRGSAEPSG

SEQ ID NO: 2759 - protein, 423 aa, unidentified
  REGION 1..423: note = Category: MG90 effectors
  REGION 1..423: note = Description: MG90-82 effector
  source 1..423: note = uncultivated organism sequence
MAEEIKESVCSFCGKHYTDNDKTILFTADTPGALICYDCAKEIYSNYKDKIDSMREVSGSVQADQKWTPQSMKEYLDQYIIGQEKAKEILCTAVYNHYQILKMREDGNKDAVEVEKSNVIMAGPTGVGKTAIIKRLAKIMQVPCVIADSTSLTSAGYVGDDVESVIQSLLIEADYDVEKAQKGIVYLDEIDKTNRHGENPSTTADPGHEGTQQALLKLIEGTVANVPLKGQRKHPNADMVKVDTSNILFIVGGAFEGIEKIITRRHNSGMAGVGFGSVLVNDKDKKKSYNEIIGDLRVEDLKKFGMTPELLGRLPVICPMKELTEEQLVEILSKPKNSLLKQYQTLFKAQGVDLTFDDEALKTVAHLAIERKTGARGLRGIMENILSHEMYSIPSDDSIGSVTVTGKDFEIIRGEKPAEKVSA

SEQ ID NO: 2760 - protein, 432 aa, unidentified
  REGION 1..432: note = Category: MG90 effectors
  REGION 1..432: note = Description: MG90-83 effector
  source 1..432: note = uncultivated organism sequence
MAILDCVCSFCGNVIPDDISCVQGIGNTYICEPCARKVISSLNMTNTFLENEEKTKNMDAPEAFRLPHPAQIKAHLDKYIIGQEKAKEVLSVAVYNHYKMLAIKARRNAETNNTKKNMVELEKSNCLLIGPTGSGKTALIRVLAKILKVPLTIADATSYTSSGYVGKDCETILRDLLTAANGELERAERGIVYINEIDKTSRKGENMSITSDPGHEGLQQALLKLLEGSTVEVPISGRRLNPENGNSVMINTENILFIVGGAFEGIEKIIARRIRKESSAGTMGFGSQLIDKKNQKFNEFIERVTTEDLRKFGMLPEILGRLPVIAPLKELAEDELVNILYRPRNALVKQYQELLRHDGIDLEVTPLALHAIAREAIKKKTGARGLRGIMEDTLMDVMFKAPDRDENSIVIDADNHGKIIVNFIQKKVKEAV

SEQ ID NO: 2761 - protein, 354 aa, unidentified
  REGION 1..354: note = Category: MG90 effectors
  REGION 1..354: note = Description: MG90-84 effector
  source 1..354: note = uncultivated organism sequence
MDELLKPAEIKSFLDQYVIGQDAAKRYLSVAVYNHYKRLLYAPKEDEVELDKSNIVLVGPTGTGKTLMARTIARLLKVPFTIVDATVLTEAGYVGEDVESILSRLLQVADYDVEQAERGIVFIDEIDKIARKGDNPSITRDVSGEGVQQALLKILEGTVVNVPPQGGRKHPEQKFIQVNTRNILFICGGAFDGIEKRIAQRLNTRAMGYGRVNADPIDRGNLMQYVTPQDLKSFGLIPELVGRLPVLTYMQPLDRAALRSILTEPKNAIVKQYERLFEMDGVKLTFDDAVLDYIVDKAVEFKLGARGLRSICEAVMMDTMFELPSTDRKKFTVTLSYAKKKIEKANFLDLKKVG

SEQ ID NO: 2762 - protein, 382 aa, unidentified
  REGION 1..382: note = Category: MG90 effectors
  REGION 1..382: note = Description: MG90-85 effector
  source 1..382: note = uncultivated organism sequence
MAPGSSASRAHVQPAAADLDINIMTPAEIKEGLDQYVIGQDEAKRVLSVSVYNHYKRILSGKGGDVELQKSNVLLLGPSGVGKTLLAQTLAKMLGVPFAIADATTLTEAGYVGEDVENILLKLIQAADFDVQKAQIGIIYIDEIDKITRKSENPSITRDVGGEGVQQALLKILEGTVSNVPPQGGRKHPQQEFIQIDTTNILFICGGAFDGLDKYILRRTDKSALGFGSALKDNSTEAERALLRKVEPHDLVKFGLIPELIGRLPVITVLDDLDEDALVRVLKEPRNSLVKQYKELLGMDNVELTFTDEALHAIARKTIERKTGARGLRSVMESILLPIMYEVPSDATIIRVTVDEDTVEGGEAHLEYGAVRKRYKNQAALS

SEQ ID NO: 2763 - protein, 427 aa, unidentified
  REGION 1..427: note = Category: MG90 effectors
  REGION 1..427: note = Description: MG90-86 effector
  source 1..427: note = uncultivated organism sequence
MEKEGKIYCDFCGKEIEPGEFGATGINGVFICQDCLKEFHESVMAQDTYLESEKKKQEREEVEKEDFQIPRPSMIKAHLDKYIEGQDYAKRVLSVAVYNHYKMLRAKHSGEYNNKDVELEKSNILLCGPTGSGKTAVLRALSKYLKVPFTMADITSYSSAGYVGKDVETIIRDLIVAADGDVKAAERGIVYIDEIDKTSRKGENLSTTSDPGHEGVQQALLKLLEGQMVEVPNKGRRLHPESNNTTMVNTANILFIVGGAFEGIEKIVSQRLHQHSSSMGFGAKLEDKKNHQYNDFIEKVTTEDFRKFGMLPELLGRVPVIAPMKQLSEEQLVHILYRPKNALVKQYQELLSQDNVDLKFTQKALKSIAHDAIKRKTGARGLRGIMEDILNPVMFEVPDKDVDAVVVDADDDDKIKIEYKDLKKEAV

SEQ ID NO: 2764 - protein, 416 aa, unidentified
  REGION 1..416: note = Category: MG90 effectors
  REGION 1..416: note = Description: MG90-87 effector
  source 1..416: note = uncultivated organism sequence
MGRQTVRYRYRIYPTRGQEWAANRLFGCCRVLYNDVIDLFRSRFDPSNRTLMPTQSQAQSMLIAQAKKTPERAWLTEVSNVALIQMFRDAWQSCWNGVRKDRRQRFARYRSLKHNPVNSARFTRNGFTVRPNGVYLAKIGTVKTKWSRRLPSTPSSCTLIHEPNGRWYVSFVVERGTTPLPENGVFAGIDMGLSDMAAVVTTDGRRWKIGNPRNYTLLQKRIVRLQKHLAGQEKGSRRYARTRKRIAMLYAKAHDMLDDYQNKNVLHIVRETQTVGVETLDVHGIAVSHGRSARDAAIRSFLNKLEWKSEQYGRTVKHIGRWEPSTRLCSQCKHYVDGGIPEHVRVWQCADCGTILDRDWNAALNILDAAGLAESLNARGGSVRPDLASAGNGGTRGSANPSERRNVPSRRGIPVL

SEQ ID NO: 2765 - protein, 367 aa, unidentified
  REGION 1..367: note = Category: MG90 effectors
  REGION 1..367: note = Description: MG90-88 effector
  source 1..367: note = uncultivated organism sequence
MRELIYRAKRMDAMLDFDKTPSQLKKGLDEYVVGQEEAKKILSVAVYNHYKRLRAEMRNVGDEEYPDVEIEKSNVLLIGPTGSGKTYLARTLAKMLNVPFAIGDATTVTEAGYVGEDVENLVLNLVRAADYNIERAQCGIVYIDEIDKICRKNENVSITRDVGGEGVQQALLKILEGTVCNIPPKGGRKHPDQQYLRVDTRNILFICGGAFVGLDKIIARRTESKVLGFNSDIAEDSKSEAQILKKVQPEDLVKFGFIPEFIGRLPVVCSLAGLTESDLVHILTKTKNSLIKQYSKLLSLDGAKLRFTDGAVKAIARKAMDFGTGARALRSIMESVMLNIMYELPDQKKSGEVVIDESMINSASRAE

SEQ ID NO: 2766 - protein, 411 aa, unidentified
  REGION 1..411: note = Category: MG90 effectors
  REGION 1..411: note = Description: MG90-89 effector
  source 1..411: note = uncultivated organism sequence
MFETNIPERRCSFCGRGQNDVEALITGPKGVAICNVCVDECYKMLHEKEEKKKGAPVKIDKLPTPKEIKEFLDQYVIGQEEAKKVLSVAVYNHYKRIMSGGTVDDVELEKSNILLIGPTGSGKTLLARSLAKLLDVPFAIADATTLTEAGYVGEDVENILLRLIQAADYDIEKAERGIIYIDEIDKIARKSENPSITRDVSGEGVQQALLKILEGTIANVPPQGGRKHPHQQYIQIDTSNILFICGGAFVGLEDIIARRLGKGAMGFTADVDKKKMERDELLKHVEPDDLVKFGLIPELIGRLPVIATLKELTEDDLVRVLTEPKNALVKQYKKMLELEGVELEFTEDALREIAREAIRRKTGARGLRAIMEKLMTDVMFEVPTRKDVKKVIIDAEAVKTGKPKYELTKAS

SEQ ID NO: 2767 - protein, 403 aa, unidentified
  REGION 1..403: note = Category: MG90 effectors
  REGION 1..403: note = Description: MG90-90 effector
  source 1..403: note = uncultivated organism sequence
MKRCSFCGREQSKVEALISGPGGVAICNYCVDECYELIHGEKQKKGAPVKIDKLPTPKEIKEFLDQYVIGQEEAKKVLSVAVYNHYKRIMSGGSVDDVELEKSNILLIGPTGSGKTLLARSLAKLLDVPFAIADATTLTEAGYVGEDVENILLRLIQAADYDIEKAERGIIYIDEIDKIARKSENPSITRDVSGEGVQQALLKILEGTVANVPPQGGRKHPHQQYIQIDTSNILFICGGAFVGLEDIIARRIGKGAMGFTADVDKKKMERDELLKYVEPDDLVKFGLIPELIGRLPVIATLKELKEEDLVRVLTEPKNALVKQYKKLLEMEGVELVFTEEALREIAREAIRRKTGARGLRAIMEKLMTDVMFEVPTRKDIKKVIIDAEAVKTGKPKYELTKAS

SEQ ID NO: 2768 - protein, 411 aa, unidentified
  REGION 1..411: note = Category: MG90 effectors
  REGION 1..411: note = Description: MG90-91 effector
  source 1..411: note = uncultivated organism sequence
MFETGIPERRCSFCGKGQSEVEALITGPKGVAICNQCVDECYKLLHEKEEKKKGAPVKVDKLPTPKEIKEFLDQYVIGQEEAKKVLSVAVYNHYKRIMSGGTVDDVELEKSNILLIGPTGSGKTLLARSLAKLLDVPFAIADATTLTEAGYVGEDVENILLRLIQAADYDIEKAERGIIYIDEIDKIARKSENPSITRDVSGEGVQQALLKILEGTIANVPPQGGRKHPHQQYIQIDTSNILFICGGAFVGLEDIIARRIGKGAMGFTADVDKKKMERDELLKHVEPDDLVKFGLIPELIGRLPVIATLKELTEEDLVRVLTEPKNALVKQYKKMLELEGVELEFTEDALREIAREAIRRKTGARGLRAIMEKLMTDVMFEVPTRKDVKKVIIDAEAVKTGKPKYELTKAS

SEQ ID NO: 2769 - protein, 453 aa, unidentified
  REGION 1..453: note = Category: MG90 effectors
  REGION 1..453: note = Description: MG90-92 effector
  source 1..453: note = uncultivated organism sequence
MSEFVDEMLGKMMGGHEPSDSNGSTARCSFCGKKGGKDSLLVMSRSSKGIFICKDCIDSYHMKLQEEEKSSTGAKNFQKTIEGQKARIAPPVRIKKFIDDYVIGQETAKKTIAVSIYNHYKMVNMKHDLAESGNKDAGLDLSKSNLLIVGPSGSGKTHLLRVVARMLNIPFVIEDACSFTASGYVGRDVETMLRDLVDAAGGNIKAAERGIIYIDEIDKISRKGENPSTTSDPGNEAVQQGLLKLIEGNVVEVPVKGQRNHPQAETIKVNTENILFIVGGSFEGIEKIISKRVHKSAGRIGFFGETRNMHEQFNDLILEISTDDLRKFGMLPEFLGRLPVICPMQELTEDELVRILTEPKDAIVRQYRMLMGADGITLEFTDEALRKVAKEAIERKVGARGLRSIIEKILRPIMYSAPTDNDLESVVIDAGTDSEENYKVIRNYRNTADAMEA

SEQ ID NO: 2770 - protein, 474 aa, unidentified
  REGION 1..474: note = Category: MG90 effectors
  REGION 1..474: note = Description: MG90-93 effector
  source 1..474: note = uncultivated organism sequence
MKDYEEVKDTKDITEETEPKDDYEDVCYLCRRPESKAGKLIRLPMEGICICPDCMQRSFTMMGNTNINYEDLMKNMNLQDMFPGNIQDGIPKSQRLKKKKPKEKNEPVIDLKQILPPHQIKARLDDYVIGQDYAKKVMSVAVYNHYKRVATNTMDEIEIEKSNMLMIGPTGCGKTYLVRTLARLLDVPLAIADATSLTEAGYIGDDIESVVSKLLAAADNDVEKAERGIIFIDEIDKIAKKKNTTSRDVSGESVQQGLLKLLEGSDVEVPVGASSKNAMVPLTTVNTRNILFICGGAFPDLDGIIKARLNKTSGIGFGAMLSDAHDQDSDIVSQVTIDDLREFGMIPEFIGRLPVIFTLKGLDEAALVKILKEPKNAIIKQYQKLLALDEVDLQFDDGALEAIAKRAIEKKTGARALRSIIEELMLDIMYQIPKDDNIGRVTITQPYVEHRGGPLIEMRGIFSLPNKTPVAGIE

SEQ ID NO: 2771 - protein, 690 aa, unidentified
  REGION 1..690: note = Category: MG90 effectors
  REGION 1..690: note = Description: MG90-94 effector
  source 1..690: note = uncultivated organism sequence
MKHLLNYKYEIFPTKPQREQLNRTFRQTKIQWNKAVTIRKKLKSALMSGQFEHVIKTYLSAAADKSNTSSNRKKAILKVQQSLPQIDFETAAKLYDIKNLVGKVLGELTPRHADIAFLVNELKTSHSKELAERKAAIANGATGKSLPKLKTYWQMITAIGQLAGFKAKTFMDDSFESPSGMALSAIRFNVSGTKNAVRWNQAVQPKPGQRTYGATGEPRYKRRSDGFAYQIHDAAPADLIRSKKKNGHQIHLKALHKGNAWVDFAYHRPVPVDDKIKQFTVMTKAGRYFIALSTEVPTSAWAIAPMEAGWHAGIDPGAQTALTVGLVNSTSGEIKHLAIHYEFLEKSLTKLETLQQALSLKQGPRRKRTEVEIQEALTQYSKKRAVQKLTNAEKEKTLAKERERLERRMVFQGASRKWRQGAKSVSSLMLKIANQRQDVLHKISRALAEGCDVVGIGHWEPEREVSFRKKLRLLKKQVKAGVAGATATLKEHIEEKSKEGPKGIKKRRRGGRDRSIATLRMLINEKAVRSGVKAFTDINESYSTMTCSSCGEATGPTGIVNLGIREWQCGNCNVSHHRDLNSAFNILKKTELELAAAQAAAPATGSTATRTDAQGAQSAPGSDAGSGYLATGHHGRGGSFFYEHAEVSLPDLWKEEVPRALKSLIQMGVVRALTLQRADEKSSKSPPAQT

SEQ ID NO: 2772 - protein, 426 aa, unidentified
  REGION 1..426: note = Category: MG90 effectors
  REGION 1..426: note = Description: MG90-95 effector
  source 1..426: note = uncultivated organism sequence
MNDIVDIDENQHYCCFCGKAISDEATVVQGDDNVLICFDCIKEIYEENIERVEQRKKNALINKLNKDVTPSSIKRYLDEYIIGQESAKKVLSVAVYNHYKSLRIKSKDNAVDLEKSNIILLGPSGCGKTAILKALSKFLNVPFAMADASTLTAAGYVGADVETVLQKLILEANGDIKKAQKGIVYIDEIDKIARKGENLSTTADPGHEGVQQALLKMIEGSVVSVPPKGQRNHPQADMIRIDTSNILFIVGGAFENIDKIVEKRIKSSKGSMGFNGVLKDTSKTYNDFIKEVRTEDLKKFGMLPELLGRLPIICPMEELDKKALIRILTEPKNALVKQYQAILQADNVKLSFTEKALEYIADKAIKRKTGARSLRSILEEELNQTMYELPDKKDITAVLVAVENNNICIEYIKEIEGVKIYDNICK

SEQ ID NO: 2773 - protein, 479 aa, unidentified
  REGION 1..479: note = Category: MG90 effectors
  REGION 1..479: note = Description: MG90-96 effector
  source 1..479: note = uncultivated organism sequence
MSDYKDKDELTKTEDTSSDHKKDDSHKEYEDICYVCRRPESKAGKMIHLPINNICVCADCMQKSFDTMNNSGMSDMMNMNNINFQDLMNFGMPMMGGPDMMPKSQKLKKKKPKEEAQPVFDIKKIPAPHVIKAQLDDYVIGQEYAKKVMSVAVYNHYKRVATNTMDDIEIEKSNMLMIGPTGCGKTYLVRTLAKLLDVPLAITDATTLTEAGYIGDDVESVVSKLLAAADNDVEKAERGIIFIDEIDKIAKKKNTTSRDVSGESVQQGLLKLLEGSDIEVPVGASSKNAMVPMTTVSTRNILFICGGAFPDLENIIKERLTQQSSIGFIADLKDKYDNDKNLISKVTIDDLRTFGMIPEFIGRLPVIFTLQGLSEDMLVKILKEPKNAILKQYQKLLALDEVDLQFSDDALTAIAAKAMEKKTGARALRSIIEEFMLDIMYEIPKDDNIGRVTITREYIENTGGPVIEMRGALPVTKNS

SEQ ID NO: 2774 - protein, 351 aa, unidentified
  REGION 1..351: note = Category: MG90 effectors
  REGION 1..351: note = Description: MG90-97 effector
  source 1..351: note = uncultivated organism sequence
MPKPKDIKEYLDQYIIGQDDAKRYMSVAVYNHYKRLAQANTDKKDQDDVEIEKSNIVMVGSTGTGKTLLARTIARLLDVPFTIVDATVFTEAGYVGEDVESILSRLLQVADYDVAKAERGIVFIDEIDKIARKADNPSITRDVSGEGVQQGLLKLLEGTMVNVPPKGGRKHPDQDYIHVDTRNILFICGGAFDGIEKRIAQRLNAHTVGYNSVQNAKKIDPKNLMKYVEPQDLKSFGLIPEIIGRLPVLTYLNPLDKEALTRILVEPKNSIVKQYIKLFAMDGVKLTFKQDALDYIVDKAVEFKLGARGLRSIVETIMMDAMFEIPSSGEKQFEVTKEYAENQMEKRGNLA

SEQ ID NO: 2775 - protein, 411 aa, unidentified
  REGION 1..411: note = Category: MG90 effectors
  REGION 1..411: note = Description: MG90-98 effector
  source 1..411: note = uncultivated organism sequence
MFETKIPMRRCSFCGRDQSKVEALITGPGGVAICNYCIDECYEMIHQEEERKGAPSISIDKLPTPKEIKEFLDQYVIGQDEAKKVLSVAVYNHYKRIMSGKDTDDVEIEKSNILLIGPTGSGKTLLARSLAKLLDVPFAIADATTLTEAGYVGEDVENILLRLIQAADYDIEKAERGIIYIDEIDKISRKSENPSITRDVSGEGVQQALLKILEGTIANVPPQGGRKHPHQQYIQIDTTNILFICGGAFVGLEDIIARRIGKGAMGFTADVDKKKLNRDELLKHVEPDDLVKFGLIPELIGRLPVVATLSELKEEDLVRVLKEPKNALVKQYKKLLELEGVELEFTDDALRAIAKEAIRRKTGARGLRAIMEKIMTDVMFEVPTRKDIKKVIIDADSVKTGKPKYELVKAS

SEQ ID NO: 2776 - protein, 424 aa, unidentified
  REGION 1..424: note = Category: MG90 effectors
  REGION 1..424: note = Description: MG90-99 effector
  source 1..424: note = uncultivated organism sequence
MENKIVCEMCGREIPAQTTVVQSIKGQVFCADCISKCYKALKNMEPHIEKAEKTRDLDTKAVKLAKPTELKKYLDGFIEGQEKAKQVLSVAIYNHYKKLVMRASGKATKGIELEKSNVLLIGPSGCGKTAILRSLAKALKVPFVMADATAYSSSGYVGRDVEMIIRDLLNAAGGDVEAAERGIVYIDEIDKIGRKGENVSTTADPGHEGVQQAILKLLEGSVLEIPDKGQRVHPDAKMTRVNTENILFIVGGAFEGIEKIIAARLRKQLDAGTMGFGSQLVDTKNQRFNEFIEQVTTDDLKKFGMLPEVLGRVPIIAPMKELSEEQLVHILYHPKNALIRQYKELLSYDNVVLDVTEEAMRAIAKEAIARKTGARGLRGIMEEILGPVMFSAPDRGEDITLDVDKDGKIAVIYQKHEDVKREAV

SEQ ID NO: 2777 - protein, 403 aa, unidentified
  REGION 1..403: note = Category: MG90 effectors
  REGION 1..403: note = Description: MG90-100 effector
  source 1..403: note = uncultivated organism sequence
MSILEDESSLANRKTGYERETQAKILPKPQEIKKQLDNYVIGQEQAKIALSVAVYNHYKRIYFGKSDDVELSKSNVLLLGPTGVGKTMLAQTLARILDVPFAIADATTLTEAGYVGEDVENILLRLIQAADFNIELAERGIIYIDEIDKIARKSENPSITRDVSGEGVQQALLKILEGTVSNVPPQGGRKHPHQEFIQVNTKNILFICGGAFDGLEKIIERRLDQKSIGFGANVQGKKDKDISKILHEVQPHDLLKFGIIPELVGRLPVIASLNALKREDLVRILTEPKNALVKQYKKLMEYDEVELEFQPEALEAIADKAIERNIGARGLRAVMEGILTPMMYDIPSDPTVVKAVITKDCVEGRSGPELTHDPKKINYSVKLNTGKGEGRPASGSSTPASAS

SEQ ID NO: 2778 - protein, 423 aa, unidentified
  REGION 1..423: note = Category: MG90 effectors
  REGION 1..423: note = Description: MG90-101 effector
  source 1..423: note = uncultivated organism sequence
MAEEIKESVCSFCGKHYTDNDKTILFSADTPGALICYDCAKEIYSNYKDKIDSMREVSGSVQADQKWTPQSMKEYLDQYIIGQEKAKEILCTAVYNHYQILKMREDGNKNAVEVEKSNVIMAGPTGVGKTAIIKRLAKIMQVPCVIADSTSLTSAGYVGDDVESVIQSLLIEADYDVEKTQKGIVYLDEIDKTNRHGENPSTTADPGHEGTQQALLKLIEGTVANVPLKGQRKHPNADMVKVDTSNILFIVGGAFEGIEKIITRRHNSGMAGVGFGSVLVNDKDKKKSYNEIIGDLRVEDLKKFGMTPELLGRLPVICPMKELTEEQLVEILSKPKNSLLKQYQTLFKAQGVDLTFDDEALKTVAHLAIERKTGARGLRGIMESILSHEMYSIPSDDSIGSVTVTGTDFEIVRGEKPAEEISA

SEQ ID NO: 2779 - protein, 354 aa, unidentified
  REGION 1..354: note = Category: MG90 effectors
  REGION 1..354: note = Description: MG90-102 effector
  source 1..354: note = uncultivated organism sequence
MEELLKPAQIKDFLDQYVIGQDDAKRYMAVAVYNHYKRLLYAPKEDEVEIDKSNIVLVGPTGTGKTLMARTIAKLLNVPFTIVDATVLTEAGYVGEDVESILSRLLQVADYNVEQAERGIVFIDEIDKIARKGDNPSITRDVSGEGVQQALLKILEGTTVNVPPQGGRKHPDQKFIQVDTRNILFICGGAFDGIERKIAQRLNTRAMGYGRAGADPIDRSNLMQYVMPQDLKSFGLIPELVGRLPVLTYMQPLGREALRSILTEPKNAIVKQYVRLFEMDGVKLAFDDEVLDYIVDRAIVYKLGARGLRSICEAVMMDTMFDIPSSGCKEFRVTLPYAKEKIEKANFVELKKVG

SEQ ID NO: 2780 - protein, 439 aa, unidentified
  REGION 1..439: note = Category: MG90 effectors
  REGION 1..439: note = Description: MG90-103 effector
  source 1..439: note = uncultivated organism sequence
MIDWGLQQHVTSKLTVPKPKDIKAKLDEYIVKQDYAKKVLAVAVHNHYKRIMSPAKDGIELGKSNILLIGPTGTGKTLLAQTLAKILDVPFAMADATSLTEAGYVGDDVENVVLNLVNAADGDIERACRGIIYIDEIDKIAKKGENPSITRDVSGEGVQQSLLKMIEGTVAAVPPKGGRKHPQQEFLRVDTTNILFICGGAFVGLADIIDKRTSLGSMGFNANVVNKDKRDLSALYHALEPEDLLKFGLIPELVGRLPVVATLEPLDEAALTEILTEPKNSLVKQYKKMFKIDGVDLEFDDDALAEIAKLAIKKESGARGLRSILENAMMPFLYAVPGMPNMKKLVVTSDIIAKQGDLSQIDELNARYNAKQDDKSSNASTKTSDAKSDADQSDDAKSGSEQSDDKSISSDDTIDDKSINADDKKAKSARAKKTKKTDP

SEQ ID NO: 2781 - protein, 408 aa, unidentified
  REGION 1..408: note = Category: MG90 effectors
  REGION 1..408: note = Description: MG90-104 effector
  source 1..408: note = uncultivated organism sequence
MTAGNNNQTVRYNYRLYPTKTQETVLNRLFGCCRVVYNDTIDFFNNNFNPNNQSKLPTASKASKQILTNAKKTTKRAFLKEVSSVALQQEFRNAWLACWHGVSHTSNQKPAKRKTKKHNPVNSANFTSNGFSVNQHGVYISKIGVIKTKWSRPMPSEPTSCTISHARNGRWYASFVVKRPKTPFKQCDNNAGIDMGLTDMATIVNTRGERWKIANPRNYAKIQDKIGRLQRHLSKQTKGSKRYERTRHQIALLYSKAHDALADYQWKNVLNIIRETQAIGVETLDIQSMKAKHGKSVRDAAMRSFLNKLGSKAEEHDRSIIQLNQWLATTKLCALCKYKLKAGIPEYARHWVCPKCGAHLDRDYNAALNILDAAGLAESLNARGGGVRSFLASAENGCSRRTAYHPSF

SEQ ID NO: 2782 - protein, 438 aa, unidentified
  REGION 1..438: note = Category: MG90 effectors
  REGION 1..438: note = Description: MG90-106 effector
  source 1..438: note = uncultivated organism sequence
MPKDEFTTRRLHRCSFCYKTQDQVRRLVAGPDGYSGDEGIKLCYDIIADDVTPMSTAAPDSPSLPLPSEMKAVLDEYVIGQDEAKRTLCVAVYNHYKRINAPQKAGDVELQKSNILMVGPTGCGKTYLAQSLARILNVPFAIADATALTEAGYVGEDVENILLRLIQAADGDIRAAQRGIIYIDEIDKISRKGENVSITRDVSGEGVQQALLKILEGTVANVPPQGGRKHPQQEFMQIDTTNILFICGGAFDGLAPIIQQRIGSRTLGFGAKLTGDSAADVGNVLRQLRPEDLMKFGLIPEFVGRLPVVVTLDQLDESALVRILTEPRNALVKQYAKLLELDGVSLSFDQDALTAIAHMAMQQKSGARGLRAIIEKALLDTMFDLPGQNDVTACHVTGDVITAGAKPQLTRAAHSARTLRSKKPAALPEEKKEAPDAV

SEQ ID NO: 2783 - protein, 394 aa, unidentified
  REGION 1..394: note = Category: MG90 effectors
  REGION 1..394: note = Description: MG90-107 effector
  source 1..394: note = uncultivated organism sequence
MEEGSAEKGHVTVVYPAYPNGAQERELLRTLDVVRGLYNHFLAECIADVVEGDRFPTPMEMNKGITEMRSRDEELRSVAVFILRDAPLRVHAAMTRFAKLSAMSGELRLPRFKSESRYRSLAFDPKSVSFDGRRIVLGRWMGLRCGNIDRSHRLHRPEGGRVVTARIVRRGSDRWYVHVTFEVDKRYRSGIDLSDPAQPEAYDLGLCDIITDTKGEKVVAPDLYARHEREIARLQRQIESMEDGPKRRKKQRRLAVLHERIRRRRDGYLDEVANQMVSGHSAVILEDLRLRRMMERDDNPAPRRKLFTEAALGILVRKVEAKAERACIPLVKVDPAYTTRTCSCCGHVGGRMPLTQRVFSCPRCGLEMDRDHNAALNILGSGMGTLRGSAEPSG

SEQ ID NO: 2784 - protein, 392 aa, unidentified
  REGION 1..392: note = Category: MG90 effectors
  REGION 1..392: note = Description: MG90-108 effector
  source 1..392: note = uncultivated organism sequence
MSRRAGGSEDKWFVTRVYPAYPNRTQERELLRQLDVARGVYNHFADTCIHCLIDGVHIPDPMEMNREFTLMRADDCLLRSVNSYTLREGINRVWQAVERCERRSLADGELHVPRIKTPPRFRSICFDPKSSKIENSRIRLNRDLSVRCRNLVRPRNGRAVTVRAVRRGTGRWYICITYETDRVVRGEMDVGEPDRAEGYDLGLVDLITDSSGNKIRTPDFFREAEAELAHLRRQLSRLEEGTAKWLKTRRRIARIEERIRSRRDGCLDRVADWMVSGKPTVVVEDIDVRRLASREDGTLVRRKRFTEAAWATLVGKAERKARKTDVRLIRVSPAYTTRTCSRCGHVGDGIPLSERMFRCPACGLEMDRDRNAARNILGSGMGTQRCTAEPSG

SEQ ID NO: 2785 - protein, 391 aa, unidentified
  REGION 1..391: note = Category: MG90 effectors
  REGION 1..391: note = Description: MG90-109 effector
  source 1..391: note = uncultivated organism sequence
MEEGSADKGHVTIVYPAYPNVGQLLRTLGVVRGLYNHFLAESIADVMEGDRFPTPREMNKAITVMRGRDIGLGSVAVFTLRDAPLRVHAAMTSFAKLSARSGELRLPRFKSESRYRSLAFDPKGVKFDGRRIVFGKWMKLRCGNLDRNRKLHRPEGGRIVTARIVRKGSGRWYVHITFEVDRRYRSEIDLSDPAEPEAYDLGLCDIITDSKGERIGAPDLYARHENEIARLQRQIASMEDGPKRRKKPRRLSVLHERIRRRRDGYLDEVADRMVSGHSAVILEDLRLRRMIERDDSPAPRRKLFTEAALGTLVRKVEAKAERACIPLVKVDPAYTTRRCSCCGHVGEKMPLSLRVFSCPRCGLEMDRDHNAALNILGSGMGTLRGSAEPSG

SEQ ID NO: 2786 - protein, 411 aa, unidentified
  REGION 1..411: note = Category: MG90 effectors
  REGION 1..411: note = Description: MG90-110 effector
  source 1..411: note = uncultivated organism sequence
MFETQVPMRKCSFCGRPQNEVEALITGAGGVAICNFCIDECYKMLHEGEEKKKGAPISIDKLPTPKEIKEFLDQYVIGQEEAKKVLSVAVYNHYKRIMAGGSVDDVELEKSNILLIGPTGSGKTLLARSLAKLLDVPFAIADATTLTEAGYVGEDVENILLRLIQAADYDIEKAQRGIIYIDEIDKIARKSENPSITRDVSGEGVQQALLKILEGTIANVPPQGGRKHPHQQYIQIDTSNILFICGGAFVGLEDIIARRIGKGSMGFTADVDKKKMERDELLKHVEPDDLVKFGLIPELIGRLPVIATLKELKEEDLVRVLTEPKNALVKQYKKLLELEGVELEFTEEALREIAREAIRRKTGARGLRAIMEKLMTNVMFEVPTRKDIKKVIIDAEAVKTGKPKYELTKAS

SEQ ID NO: 2787 - protein, 385 aa, unidentified
  REGION 1..385: note = Category: MG90 effectors
  REGION 1..385: note = Description: MG90-111 effector
  source 1..385: note = uncultivated organism sequence
MLLSGIEGYICKDCSDQAVKIFKEQHQHRPGKGYDPNTPIPTPTEIKEFLDLYVIGQDAAKRVLSVAVYNHYKRLKYNALNGDKNDVEIEKSNIILVGETGTGKTLLARTIARLLKVPFCIADATTLTEAGYVGDDVENVLVRLLQAADYDVAAAERGIVFIDEIDKIARKSENTSITRDVSGEGVQQALLKLLEGAEVSVPPEGGRKHPEQKLINVNTRNILFICGGAFDGVERSIAARLNSNVIGFKGDEKRQELDRENMLQYVQPMDLKKFGLIPELVGRFPVLTHLEALDRDALRRILTEPKNALTKQYEALFSMDGVELKFDPAVLDMIVDRAVEYHLGARGLRGIMEGIMTDLMFDLPQMPKGGTYTLTPEVAKAKMKL

SEQ ID NO: 2788 - protein, 340 aa, unidentified
  REGION 1..340: note = Category: MG90 effectors
  REGION 1..340: note = Description: MG90-112 effector
  source 1..340: note = uncultivated organism sequence
MVGQDRAKRSIAVAVYNHYKRILGKGDPNVDIEKSNILMIGPTGSGKTYIARSLAKILGVPFAIADATTLTEAGYVGEDVENVLLKLINAADNDIKRAEKGIVYIDEIDKIARKGENTSITRDVSGEGVQHALLKILEGTVASVPPQGGRKHPQQEMLKIDTSNILFICGGAFAGIEKILAKETKKNAIGFGAAFEEKKEMTLSEQLRGLTPQDLMKFGLTPEFVGRLPVFVALDELDEEAMVRILTEPRNSLVKQYQKLLEIDGVELEFEPEALREIAQTAMRKNTGARGLRAIMENVMEDIMFDMPDEENVKKCIVTKAAVLGEEKPVLVRGKQDRSA

SEQ ID NO: 2789 - protein, 426 aa, unidentified
  REGION 1..426: note = Category: MG90 effectors
  REGION 1..426: note = Description: MG90-113 effector
  source 1..426: note = uncultivated organism sequence
MNDIVDIDENQHYCCFCGKAISDEATVVQGDDNVLICFDCIKEIYEENIERVEQHKKNALINKLNKDVTPSSIKRYLDEYIIGQESAKKVLSVAVYNHYKSLRIKSKDNAVDLEKSNIILLGPSGCGKTAILKALSKFLNVPFAMADASTLTAAGYVGADVETVLQKLILEANGDIKKAQKGIVYIDEIDKIARKGENLSTTADPGHEGVQQALLKMIEGSVVSVPPKGQRNHPQADMIRIDTSNILFIVGGAFENIDKIVEKRIKSSKGSMGFNGVLKDTSKTYNDFIKEVRTEDLKKFGMLPELLGRLPIICPMEELDKKALIRILTEPKNALVKQYQAILQADNVKLSFTEKALEYIADKAIKRKTGARSLRSILEEELNQTMYELPDKKDITAVLVAVENNNICIEYIKEIEGVKIYDNICK

SEQ ID NO: 2790 - protein, 391 aa, unidentified
  REGION 1..391: note = Category: MG90 effectors
  REGION 1..391: note = Description: MG90-114 effector
  source 1..391: note = uncultivated organism sequence
MIYGPGIAKAQKKAAKKDGDKSLSSMKLLKPREIKEFLDDYVIGQDDAKISLAVAVYNHYKRIMSQEAAEKNLNDDDGVDLQKSNVLLLGPTGVGKTFLAQTLAKLLNVPFAIADATTITEAGYVGDDVENVLLRLIQAADFDIKAAERGIIYIDEIDKIARKSENTSLTRDVSGEGVQQALLKIIEGTVSNVPPQGGRKHPNQEVIQINTKNILFICGGAFDGLERQIQKRIGKAPIGFGGDIKAHHEIKDNIFKKVIPKDLVKFGMVPEFVGRLPVITVLDELDEDSLVKILTEPKNALIKQYKKLFDYDDIELEIEDGALVEIAKKAIAQKTGARGLRSILEGILMNTMFTVPSDGSIAKVTVTADCVLNGTQPILMNRRNKVVTIAV

SEQ ID NO: 2791 - protein, 435 aa, unidentified
  REGION 1..435: note = Category: MG90 effectors
  REGION 1..435: note = Description: MG90-115 effector
  source 1..435: note = uncultivated organism sequence
MAKYDDPKDRTIRCSFCGRTQDQVGMLIQGPDAFICDSCIASCLEIIESGESDSIGKPAGKKKPTASPRILPKPNELKARLDEYVIGQDEAKIALSVAVYNHYKRIYRKPKTDVEITKSNVLLLGPTGVGKTFLAQNLAKTLDVPFAIADATTLTEAGYVGEDVENILLRLIQAADFDVEKAERGIIYIDEIDKIARKSENTSITRDVSGEGVQQALLKILEGTVANVPPQGGRKHPQQEFIQIDTSNILFICGGAFDGIERIGEKRLGNSVLGFGSELIVKSELDHDTIMQKVIPQDLIKFGLIPELVGRMPVLTALRNLDEDALVRILKEPKNALFKQYKALFEIDKVELEFTDDAFRAIARSALEKNTGARGLRAIMEKVLQPVMYEIPSDPSVTRVTVTAACVNGEGNPAIERDPTRLAPPKENNLKPTIA

SEQ ID NO: 2792 - protein, 427 aa, unidentified
  REGION 1..427: note = Category: MG90 effectors
  REGION 1..427: note = Description: MG90-116 effector
  source 1..427: note = uncultivated organism sequence
MDNHKKNVICSFCGKKVSEDNFVAQGIEENIFICQDCINEIHKTVADADSFIETIEESRKKEEKKMSKLPRPSEIKAHLDQYIIGQDYAKRVLSVAVYNHYKMLDVKLNKKAINKDVELEKSNVLLAGPSGSGKTAILKALAKLLKVPFVIADATEYSEAGYVGKDVECIARDLISAANGDIRKAERGIVYIDEIDKTGRKGENLSATADPGHEGTQQALLKLLEGSVIDVPMDGRRLNPESRNLQKIDTTNMLFIVGGAFEGIDKIIAKRKRQGKNTIGIGANLTDRKNDQFNDFIEDLTTEDLKKFGMLPEILGRVPVIAPLKELTEDQLVHILYQPKNALVKQYQELLAQDGVELEVTDAALTAIAKKAIKRKTGARGLRGIMEDILNPVMFSIPDKDEDYVLIDAVDGKLEISYQKKIKREAV

SEQ ID NO: 2793 - protein, 346 aa, unidentified
  REGION 1..346: note = Category: MG90 effectors
  REGION 1..346: note = Description: MG90-117 effector
  source 1..346: note = uncultivated organism sequence
MIGQDEAKRVLAVSVYNHYKRILSGKGSDVELQKSNVLLLGPSGVGKTLLAQTLAKMLGVPFAIADATTLTEAGYVGEDVENILLKLIQAADFDVQKAQIGIIYIDEIDKITRKSENPSITRDVGGEGVQQALLKILEGTVSNVPPQGGRKHPQQEFIQIDTTNILFICGGAFDGLDKYILRRTDKSALGFGSSLKDNSSEAEKALLRKVEPHDLVKFGLIPELIGRLPVITVLDDLDEDALVRVLKEPRNSLVKQYKELLSMDNVELNFTDEALHAIARKTIERKTGARGLRSVMESILLPIMYEVPTDATIIRVTVDEDTVEGGEAHLEYGAVRKRYKNQAALS

SEQ ID NO: 2794 - protein, 403 aa, unidentified
  REGION 1..403: note = Category: MG90 effectors
  REGION 1..403: note = Description: MG90-118 effector
  source 1..403: note = uncultivated organism sequence
MRKCSFCGRPQNEVEALITGAGGVAICNFCIDECYKMLHEEEQKKGAPVSIDKLPTPKEIKEFLDQYVIGQEEAKKVLSVAVYNHYKRIMAGGSVDDVELEKSNILLIGPTGSGKTLLARSLAKLLDVPFAIADATTLTEAGYVGEDVENILLRLIQAADYDIEKAQRGIIYIDEIDKIARKSENPSITRDVSGEGVQQALLKILEGTIANVPPQGGRKHPHQQYIQIDTSNILFICGGAFVGLEDIIARRIGKGSMGFTADVDKKKMERDELLKHVEPDDLVKFGLIPELIGRLPVIATLKELKEEDLVRVLTEPKNALVKQYKKLLELEGVELEFTEEALREIAREAIRRKTGARGLRAIMEKLMTNVMFEVPTRKDIKKVIIDAEAVKSGKPKYELTKAS

SEQ ID NO: 2795 - protein, 393 aa, unidentified
  REGION 1..393: note = Category: MG90 effectors
  REGION 1..393: note = Description: MG90-119 effector
  source 1..393: note = uncultivated organism sequence
MEQEDKASGKKSKGKQKEDKHELIKPAELKEILDKYIIGQDEAKKTICVSVYNHYKKNFFGDEATADEIELQKSNVLLLGPTGVGKTMIAQTLANVLKVPFAIADATTLTQAGYVGEDVENVLLRLIQAADYDIEAAEHGIIYIDEIDKITRKSENTSITRDVSGEGVQQALLKIIEGTVSNVPPQGGRKHPNQEFIQINTKNILFICGGAFEGIDKLVMQRTSSSALGFGAEVKSKQDNKINEARHQGEPEDLDKFGIIPELVGRLPVIAVLDDLDEDALVKILSEPKNAILKQYSYMFSLDGIELEITDDAMRAIAKKAAERKTGARGLRTVVEEALSDIMFDAPSDDTISKVILTGECVTDGKAPEVIRDPSARKNRRNSEKKTAKKNPA

SEQ ID NO: 2796 - protein, 354 aa, unidentified
  REGION 1..354: note = Category: MG90 effectors
  REGION 1..354: note = Description: MG90-120 effector
  source 1..354: note = uncultivated organism sequence
MDQYVIGQDAAKKVLSVAVYNHYKRVLAGKDLDVELQKSNILLLGPTGSGKTYLAQTLAKILNVPFAIADATTLTEAGYVGEDVENILLKLIQAADYDIERAQHGIIYIDEIDKITKKSENVSITRDVSGEGVQQALLKILEGTEASVPPQGGRKHPQQELIPIDTTNILFICGGAFDGLGKIIERRLDKGSIGFNSQIIEKTDKSEDELFKQVMPEDLTKFGLIPEFIGRVPVTVSLDFLDEKALERILTEPKNALIKQYKKLFELDGVELKFTDEAINTIAKKAVERKTGARGLRAILENAVMDIMYETPSDETIKECIVNEDVINGLADPELVYNSVIGKKKAKKNKDKTA

SEQ ID NO: 2797 - protein, 367 aa, unidentified
  REGION 1..367: note = Category: MG90 effectors
  REGION 1..367: note = Description: MG90-121 effector
  source 1..367: note = uncultivated organism sequence
MKIRFEEFKDEISTDILDSKTPKELLAILNDYVIGQDNAKRALSVAVYNHYKRINFMASKADEEVELQKSNILMIGPTGSGKTFLAQTLAKSLNVPFAIADATSLTEAGYVGEDVENILLKLLQAADYNVDRAERGIIYVDEIDKIAKKSENVSITRDVSGEGVQQALLKIIEGTVASVPPQGGRKHPNQEMIQLDTKNILFIVGGAFDGIEEIVKQRLGEKIIGFGFNNKALSEDMSYMQEIIAEDIQKFGLIPEFIGRLPIVAALESLTESDLVHILTQPKNALVKQYQRLLSFDNVELEFEDAALKAIAEKAIQRKTGARGLRSIIEEVMMDVMFEIPSMTGIRKVVITEDAVLGTNEPLLIGA

SEQ ID NO: 2798 - protein, 393 aa, unidentified
  REGION 1..393: note = Category: MG90 effectors
  REGION 1..393: note = Description: MG90-122 effector
  source 1..393: note = uncultivated organism sequence
MEQEDKASGKKSKGKQKEDKHELIKPAELKEILDKYIIGQDEAKKTICVSVYNHYKKNFFGDEATADEIELQKSNVLLLGPTGVGKTMIAQTLANVLKVPFAIADATTLTQAGYVGEDVENVLLRLIQAADYDIEAAEHGIIYIDEIDKITRKSENTSITRDVSGEGVQQALLKIIEGTVSNVPPQGGRKHPNQEFIQINTKNILFICGGAFEGIDKLIMQRTSSSALGFGAEVKSKQDNKINEALHQVEPEDLVKFGIIPELVGRLPVIAVLDDLDEDALVKILSEPKNAILKQYSYMFSLDGIELEITDDAMRAIAKKAAERKTGARGLRTVVEEALSDIMFDAPSDDTISKVILTGECVTDGKAPEVIRDPSARKNRRNSEKKTAKKNPA

SEQ ID NO: 2799 - protein, 496 aa, unidentified
  REGION 1..496: note = Category: MG90 effectors
  REGION 1..496: note = Description: MG90-123 effector
  source 1..496: note = uncultivated organism sequence
MQTKNPDSQTMDPKKARCVFCGKTADEVAGMIQSPDGTCICDECILYCTDVLARGGYLNGRHPSQGNMPDSFDGDFDGYEGHIAQAPFDDEEQGAPSAAEILAALPTPHELFDRLSQHVVGQEAAKRALSVAVYNHYKRISLGAESNDDDVELAKSNIMLLGPTGSGKTLLAQTLARTLQVPFAIADATTLTEAGYVGEDVENILLKLITAADFDIERAQIGIIYIDEIDKIARKAENLSITRDVSGEGVQQALLKIVEGTEASVPPQGGRKHPQQELIHIDTTNILFILGGAFVGLADIIGQRVGKKGIGFTSDVPQSKKHAEAELLEKVLPEDLNKFGMIPEFVGRIPVICSLDELTEDDLVHILTDPKNALVKQYVRMFEFENSELVFTPEALRAIAHEAVEHGTGARGLRAICERVLQDVMFDLPEHAGRGWLFARAISRAKRNPKSSRRPTRLSSPNKCHGLAACATGLFQYSALQANKLGAESGRAFQEL

SEQ ID NO: 2800 - protein, 338 aa, unidentified
  REGION 1..338: note = Category: MG90 effectors
  REGION 1..338: note = Description: MG90-125 effector
  source 1..338: note = uncultivated organism sequence
MIGQDDAKRYMSVAVYNHYKRLLHASGEASEVELDKSNILLVGPTGTGKTLMARTIAKLLNVPFTIVDATVLTEAGYVGEDVESILSRLLQVASYDVELAQRGIVFIDEIDKIARKSDNPSLTRDVSGEGVQQALLKILEGTVVNVPPQGGRKHPEQQFVQVDTRNILFICGGAFDGIEKKIAQRLNTRAMGYGRMNADSVDRNNLMQYLMPQDLRSFGLIPELVGRLPVLTYMEPLGREALRSILTQPKNAIIKQYEKLFEMDGVKLVFDDEVLDYIVDKAIEYRLGARGLRSICEAIMMDTMFDIPSSGERRFEVTLPYAREKFEKKKFLALKQVG

SEQ ID NO: 2801 - protein, 337 aa, unidentified
  REGION 1..337: note = Category: MG90 effectors
  REGION 1..337: note = Description: MG90-127 effector
  source 1..337: note = uncultivated organism sequence
MLAVSVYNHYKRILSGKGADVELQKSNVLLLGPSGVGKTLLAQTLAKMLGVPFAIADATTLTEAGYVGEDVENILLKLLQAADFDVQKAQVGIIYIDEIDKITRKSENPSITRDVGGEGVQQALLKILEGTVSNVPPNGGRKHPQQEFIRIDTTNILFICGGAFDGLDKYILRRTDRSALGFGSSLKDNSEDAQRALLRKVEPHDLVKFGLIPELIGRLPVITVLDDLDEDALVRVLKEPRNSLVKQYKELLSMDSVELEFTDEALHAIARKTIERKTGARGLRSVMEGILLPVMYDVPNDPTIIRVTIDKDTVEGGEAHLEYGAVRKRYKNQTALS

SEQ ID NO: 2802 - protein, 398 aa, unidentified
  REGION 1..398: note = Category: MG90 effectors
  REGION 1..398: note = Description: MG90-128 effector
  source 1..398: note = uncultivated organism sequence
MDIIADEDSLHRGRPQPKNKPRAEMVLPKPQEIKKQLDEYVIGQDEAKMTLAVAVYNHYKRIFFSGEDGGVEIAKSNVLLLGPTGVGKTYLAQTLAKLLDVPFAIADATTLTEAGYVGEDVENILLRLIQAADYDIERAEHGIIYVDEIDKISRKSENPSITRDVSGEGVQQALLKILEGTIAGVPPKGGRKHPQQEVINIDTSNILFICGGAFDGLKSVIQRRTETQTLGFNSVIKSKDELDNTEWMKEVTPHDLVKFGLIPELVGRLPVITALSDLDKAALVRILTEPKNCLVSQYKKLFDLDKVDLEFTPEALDAIAEKTIARKTGARGLRSIMEDTLKNLMFEVPSDYTIEKITVTKDSVENGAAPEIVHNPDRVPVKIKMTQPKRLARKDSAS

SEQ ID NO: 2803 - protein, 537 aa, unidentified
  REGION 1..537: note = Category: MG90 effectors
  REGION 1..537: note = Description: MG90-129 effector
  source 1..537: note = uncultivated organism sequence
MPNLLNYKYEIFPTKPQKAQLYRILRESKYQWNKAVTIRKKLKSALVSGQIEFVINTCLSAEKNNQQGQRANAIEKLRSQFPEMEFETAAHCYDVKNIIGKVLGDLPIEKLLDLKSLSEELKTRHEKEVANRKDAIAKGIDNKKLPKLTVLWQLIGAINRYAGYAAKKYMDKSFESSKGMSVSPVRSNISGSANSPRWNNAVQPSKDQRSYGATGEPNYKKRCDGFSYQIPQKKAEAVSEFFRLKRQNHGYQIFLNPLHEGNRWIDTAYHRPIPEGSKIKQMTINERAGHFFAVLSVEVPDRAWMIASMQAGWWAGIDPGASTALTIAFHNAETSETRQAAINYQFLEKSLAQLEKLQQCIAKKQGPRRKRTEDEVNKELAQFSKKQSIQKLPEQERSKIIAKKKENLEKKMIRQDASNSWKKFSRKVGEFNYRIANKRLDVLHKISRSLIEGCDVVGIGHWEPERQVSYRKERKALKKQVKAGVAGAKERLNALEEEKSKQGPKGVKKARRGGRDRAIATLRGLVDEKAKRAGTVE

SEQ ID NO: 2804 - protein, 423 aa, unidentified
  REGION 1..423: note = Category: MG90 effectors
  REGION 1..423: note = Description: MG90-130 effector
  source 1..423: note = uncultivated organism sequence
MAEEIKESVCSFCGKHYTDNDKTILFTADTPGALICYDCAKEIYSNYKDKIDSMREVSGSVQADQKWTPQSMKEYLDQYIIGQEKAKEILCTAVYNHYQILKMREDGNKNAVEVEKSNVIMAGPTGVGKTAIIKRLAKIMQVPCVIADSTSLTSAGYVGDDVESVIQSLLIEADYDVEKAQKGIVYLDEIDKTNRHGENPSTTADPGHEGTQQALLKLIEGTVANVPLKGQRKHPNADMVKVDTSNILFIVGGAFEGIEKIITRRHNSGMAGVGFGSVLVNDKDKKKSYNEIISDLRVEDLKKFGMTPELLGRLPVICPMKELTEEQLVEILSKPKNSLLKQYQTLFKAQGVDLTFDDEALKTVAHLAIERKTGARGLRGIMESILSHEMYSIPSDDSIGSVTVTGKDFEIIRGEKPAEEISA

SEQ ID NO: 2805 - protein, 365 aa, unidentified
  REGION 1..365: note = Category: MG90 effectors
  REGION 1..365: note = Description: MG90-131 effector
  source 1..365: note = uncultivated organism sequence
MYKRQIKTPAEIKEGLDQYVIGQDEAKRVLAVSVYNHYKRILSGKGADVELQKSNVLLLGPSGVGKTLLAQTLAKMLGVPFAIADATTLTEAGYVGEDVENILLKLIQAADFDVQKAQIGIIYIDEIDKITRKSENPSITRDVGGEGVQQALLKILEGTVSNVPPQGGRKHPQQEFIQIDTTNILFICGGAFDGLDKYILRRTDKSALGFGSALKDNSSEAEKALLRKVEPHDLVKFGLIPELIGRLPVITVLDDLDEDALVRVLKEPRNSLVKQYKELLSMDNVELDITDEALHAIARKTIERKTGARGLRSVMENILMPIMYDVPNDPTIIRVTIDEDTVEGGEAHMEYGAVRKRYKSQTSLS

SEQ ID NO: 2806 - protein, 508 aa, unidentified
  REGION 1..508: note = Category: MG90 effectors
  REGION 1..508: note = Description: MG90-132 effector
  source 1..508: note = uncultivated organism sequence
MGGGRRHTGNRNQGDPNLYAQRYGAKAPLEWTEAHARVLLLADQLWDDLRAIWIQCLHEQEMVEDATGDAELLSARGAVSRTEAQVDAAFQARRDWRQRHRSKQAPEEIEASIKAAISAAREARRELWPVLKRVRKEIREELLDLWNARDQQMRVLAQGRTRKYTDLHDGVYNDIFKRFRVAAKEGAKQGIVPRPSHEHLSQSIYRQIQPHNFGGKLVSDPKKPGKRRKRIGGSQKGAEWSTLCTTGCGKVRVLPYSPGPRVTQRWGLLVMPVDANGLEIKIPIRVDDREPPQGAQIKGVRVVRRDRKWHTVFSVDAPPPSIERGAGTLYAGLNWRLMADGSLRVLDGIDETGKRYQVCLPRWQLAAVEYAEALQAATDRRAVQAALQLEEDHPKRAKEIAEAVRRRNWAALYPLDPAWADGTHGKQGRRQHTALLRARKIAGGDLAKLTELVAEILGDRAGRRRIAGQKSKNTRRREKFSRECAQAIATRITRLQNAKGDPRTGTTR

SEQ ID NO: 2807 - protein, 354 aa, unidentified
  REGION 1..354: note = Category: MG90 effectors
  REGION 1..354: note = Description: MG90-133 effector
  source 1..354: note = uncultivated organism sequence
MQLATPSQIKAHLDQYVIGQDEAKRTLAVAVYNHYKRLKQNKKSDVEIQKSNILMIGSTGSGKTYLAQSLAKMLGVPFAIADATTLTEAGYVGNDCETMLRTLLQNANYDIESAQRGIIYIDEIDKISRKGENVSITRDVSGEGVQQALLKIIEGTISEVPVTGSRKHPQAETVKIDTSNILFICGGAFDGIDKIIGKEETHNSIGFGANVADKKESVTDLSKVEQHDLVKYGLMPELIGRLPIITALNPLSEEDLVHILTEPKNAITKQYQELLSMDGVKLEFEDAALRKIAELAIKKKTGARGLRSIIESAMQKVMFDVPDMAGAKKVVVTSAFVEGKADAFVYGARNKKIA

SEQ ID NO: 2808 - protein, 383 aa, unidentified
  REGION 1..383: note = Category: MG90 effectors
  REGION 1..383: note = Description: MG90-134 effector
  source 1..383: note = uncultivated organism sequence
MSFDELPRPSDIRKNLDDYIIGQERAKIVLSVAGYNHYKRILHGQDDGVELQKSNILLIGPTGSGKTLFAQTMAKMLDVPFAIADATTLTEAGYVGEDVENILLKLLQAADFDVERAQRGIIYIDEIDKIARKSENTSITRDVSGEGVQQALLKIVEGTVANVPPQGGRKHPHQEFIQVNTKNILFICGGAFDGLEKIIERRVEEKSIGFDAPVYSRKEQDVGKLLLQVQPHDLLKFGIIPELVGRLPVIASLNALTRDDLVQILTEPKNALVKQYQKLMEYDDVELEFEPEALTAIADKAIARNIGARGLRAIMEGMLTQIMYDIPSDPTIVKAVITKDCVEGTGKPVLTRDPDKISYSVKLNTGKSGDAKASTDADPASAS

SEQ ID NO: 2809 - protein, 394 aa, unidentified
  REGION 1..394: note = Category: MG90 effectors
  REGION 1..394: note = Description: MG90-135 effector
  source 1..394: note = uncultivated organism sequence
MLIEQEGKADSKKSKGKHEDEHELIKPADLKAVLDKYIVGQDEAKKTICVSVYNHYKKNFCGDDAKADEIELQKSNVLLLGPTGVGKTMIAQTLANILKVPFAIADATTLTQAGYVGEDVENVLLRLIQAADYDIEAAEHGIIYIDEIDKITRKSENTSITRDVSGEGVQQALLKIIEGTVSNVPPQGGRKHPNQEFIQINTKNILFICGGAFEGIDKLIMQRTSSSALGFGADVKSKQENKINEALHQVEPEDLVKFGIIPELVGRLPVIAVLDDLDEDALVKILSEPKNAILKQYKYMFSLDNIELEITDDAMRAIAKKAAERKTGARGLRTVVEEALSDTMFNAPSDESITKVVLTGECVTEGKKPEIIRDTNAAKLKKSADKKALKKNAG

SEQ ID NO: 2810 - protein, 728 aa, unidentified
  REGION 1..728: note = Category: MG91 effectors
  REGION 1..728: note = Description: MG91-1 effector
  source 1..728: note = uncultivated organism sequence
MAEEKQMRSYNIQINPDADAIKVIERDMKLMEQLYGFIIYRIESHIQQLREETEYGEYDSNYKEYCLLLAEAEQKKRQCEVFRDAKKRKNIEDPELESQYNELSAEIDKLKKHKNEWCSKCCEFFRSNRKALCHFVFESRRKVIRLKSDMVTPTENSGFILHYGVNGEPYYIYDKTYYMMVEDSIRKANKGDGYSALVCECGVVTKRVSLNEDKTFKDKVYDGVAVLTDDGEIIMPYEYLRIDNLNKNNAHGFSRLFVNEYVYSLNKNPQTKKSQKTSMTYKDYGLTSHDFDENIGNRLTLSYADFPELLSQKHRKNDFMTIMSGQQSKLMDIMCDESGGYFVRMVTHSYGRGKKKYVDIPVLISHRNKNRIGTERDMDTKVLERKLQLLETGKTNVIGISKDVIRGKSRFCVNIFLEYAGGLGLEYNENSLNQKLGLGPVGVDPGMHQIAVYSDSLKKSTIFSLETICGGIFKQKIYECYSKIDSLQKKMSRCMDENNCKAKDEKGNFIKGKKLFKSKRYMAMQKEVSELYRRIAELKETANIFIAHKLLSYGNVFYIEDPRSAEKKRRMQGVVYDANGRVVKNRKFGRSIQKFSISGMIYKILDVIESRGGKIYWINNESAATAYVPKRDNVSHGMGERVFNWLGHKVQRDMKSGYVLSACKELEEMKGKKKYLNKPIYKVVSYDDERLLNDVDVFAESVREEMERCRDLNVEDKTIGIEKYFNKN

SEQ ID NO: 2811 - protein, 510 aa, unidentified
  REGION 1..510: note = Category: MG91 effectors
  REGION 1..510: note = Description: MG91-2 effector
  source 1..510: note = uncultivated organism sequence
MFVVELPLKVEKWQSDVLNKRYELLAKIYNYAQTKLLRQYIYLTQMDEYKKCKTKQDKSVFFKNHPFYFKGITSKITFSEYDVTNFVNKIIKKNVSSDKTYKDFGINTSITEYLGKHAWSAWKKKIYGNGKKVSFKNKDELNTISIRKKSEYFGGLDVDIEHMILSFNINGRTKTKAKKIILPINVKNLTEYEMYALKDGYDSINVVTIMRKMIRGNYKYYVQFTIEGEKPQKGRTLGKGNVGIDIGPSTVAISSLNGVTIDTLAEKCDNIEDKISDIERKMDRSRRATNPQNFTEDGQIKRIDRKKGEKREWKYSKRYVKLHNKKRELLRKQAAIRKLRHNIKANEILSLGDTFIVENNPTSAWAKRAKGVRKNKNGKIQTNKRFGKSIGNHAPAMFVTILQNKVESLKGKFVKVDPKNAASRFDFTNSDFTEHNLDERKITLSNGNTHQRDMLAAFNLQHIDLTNDDLKKYNVNEMIEDYPIFCKLEKEEIKRFINGIKISNKSNIGI

SEQ ID NO: 2812 - protein, 542 aa, unidentified
  REGION 1..542: note = Category: MG91 effectors
  REGION 1..542: note = Description: MG91-3 effector
  source 1..542: note = uncultivated organism sequence
MKKEKNNKGNYVITFPLITEPWQEDLLNKFFKHCCDIQNKLIKITLPVFNKHKDEIFKNEERILELCAKKKKSNLNEEETNELSALYEEKKNTLSVIKTDEIKGLVSYPKTIELFSEFGLGATCTKLIKDNIGGTDKKHENLKYNSTFPQIASPIAENIGKRVYCAYEKYIWGNGKIVHYKKNCNFNTVSFCVKKGCTFATVDVIKHNLLFKSSIGIHNGKTMTIPFKVKFDKCDEQQTLSEGQKYEMNALNNQEIKIIGIKRTFVRGKFKFELQLTFEGKPYSKNRTLGNGDVGVDPGVSSLTLYGKTVRQFRAPDNVKKTEQKINELQRYIKHTDKLLNPNKFNENGTLKKGDKAKWKHSNNNLKARKRKKELERQLKEKTKLSQIEFANSVLSEGNVLKIEDNDISNWNKNLKGIRKDKNGKILSNKKYGKSIKRTAPAQGLTILKRKYKSLGGTVIDINEKARATGTDHTNGIYTYRPVSQRKVTLSNGNTHHRDAHAAFNLKHYNNNTKHYDFKKMSEDYQHFCQEESNAFKRNELK

SEQ ID NO: 2813 - protein, 532 aa, unidentified
  REGION 1..532: note = Category: MG91 effectors
  REGION 1..532: note = Description: MG91-4 effector
  source 1..532: note = uncultivated organism sequence
MPVTSQSFVIELPIAVDDAEMRTIVRKLEFARQLHNATLGTAMGQLQQMRQDAAWKEACVMPKGKERAAAFRALDRKYGLTEYDLHSVIARHREGSGRKAELGINETQKIATRVFQAINRYKLGLGGMPRFKSSKRGLHSIEGKTNKTGLKFRPEKKVLNWCGHDYRVLIDPKDDYIQRALKENERSDKYRKIKYCRLVRKRIRSSDRFFLQVVLEGTAPVKHVYAPVTERAAIDPGPQSIALFSKAFAGKIQVAGSNNFNEAASRRLLRAMDRSLRRNNPDAYNENGTIKKGAKLVKSKNYQRKVDRLREMHRVAAAERKCRHGQTINLLLSIAGDIRIEKNIWKAFQRGHFGKSLGKSAMSGFIAQLKSKAASAGLKVTEVNPYKLKLSQYDPYTDTYRKKDLSERWQEMKAGSGQYIQRDVLSALLLYCADIEKEIHIPKVAVEQLEGAKQFLTDAGYVVLKSTSSRDQRDPRLASEPKAMTPEMARQKILRGAGDSHLPTDQELGQIRAGGKVSTWSKETFPLQRGVV

SEQ ID NO: 2814 - protein, 484 aa, unidentified
  REGION 1..484: note = Category: MG91 effectors
  REGION 1..484: note = Description: MG91-5 effector
  source 1..484: note = uncultivated organism sequence
MAHKENQKAFVVTFPLRTEKWQEDRIDKMMRMLTTFYNDRQRKLVRRYIYLSHSKAYKESKGKGVVAFKNYMKEHGFSQYGLDAFFKADTKGALYQCGLNSMFLQYLSQCAWSAWDKKLFGKGDFVKTDKVVNIFCSRNKKERFCGFDYDLRTFTISIKSTCTKKIICSIPFVVNKNSEYELYALSQKICRIGIVRKLIRSKYKYYVQFTFDGVPYNKGRNIGTGIVGIDPGPSKIAIVGDNKVEIAKLAPNIEEDERKTARLKRKLDRSRRATNPHMYKEDGTIIKGQRQTCFSKAYNETRKQLADAQRKLTAKRKIAHNELANTLLEYGDTFKVEANSYKSMQARAKATSMTKSGRIRSKKRYGKSIKNRAPSEFLVILKNKLLHYPNGKYYAVPASYACTQFDFTNESFTEHKISERKIVTSDGIQHNRDTLAAFNIKNAIVNDTSTKKKKVTKSKEFFDIVKMKASYNEYCVMERYLLSV

SEQ ID NO: 2815 - protein, 490 aa, unidentified
  REGION 1..490: note = Category: MG91 effectors
  REGION 1..490: note = Description: MG91-6 effector
  source 1..490: note = uncultivated organism sequence
MAHKENQKAFVVTFPLRTEKWQEDRIDKIMRMLTTFYNDRQRKLVRRYIYLSHSKAYKEAKSKGVVAFKNYMKENGFSLYGLDAFFKADTKGALYQCGLNSMFLQYLSQCAWSAWDKKLFGNGDFVKTTKVVNIFCSRNLKGKFCGFDYDLSTFTIRIKSTCTKKIICTIPFVVNEKSYYELFALSQKICRIGIVRKLIRSKYKYYVQFTFDGIPYNKGRNIGTGIVGIDPGPSKIAIVGDNKVEILKLAPNIEEDERKTARLKRKLDRSRRATNPHMYKEDGTIIKGQRQTCFSKAYNETRKQLADAQRKLAAKRKIAHNELANTLLEYGDTFKVEANSYKSMQARAKATSVTKSGRIRSKKRYGKSIKNRAPSEFLVILKNKLLYYPKGKYYDVPASYACTQFDFTNESFTEHKISERKIVTSDGIQHNRDTLAAFNIKNSIVNDTSTKKKKITKSKEFFDIKKMKASYNEFCIMEHTSFQYKEIMEL

SEQ ID NO: 2816 - protein, 524 aa, unidentified
  REGION 1..524: note = Category: MG91 effectors
  REGION 1..524: note = Description: MG91-7 effector
  source 1..524: note = uncultivated organism sequence
MNEVFVLELPLQVEKYQADILNKRYEQLRQLYNYVQGKLLRQYRYFEQMKEYQACKTIKEKNDFFKSHPFQVNESLGGDKSAFEISFNEFSIKGFIEKLVQKSAGANMTYADLGFTTNILDHLGASVWAAWDKKLYDFKAKRISFKKYGELDSFSCRRKVVGGKVYFSGMELHLDTMELAIKMNGKQGKNAKFITLKMLYNPKHADYEMWALKGGVDSVKVVKVVRRLVRSQYKYYVQLTIEGEKPQKGRMLGKGNVGIDLGPTTVAVSGENVVSIDKLASKCDNIQEEITRLSRKIDRSRRANNSQNFNEDGTIKRGIKLVWNDSKRYKELRRELAELRRKQAAIRKQQHIDRANALLKEGDTFIVENNQISGWTTRAKETKVNEKTGKIQKKKRFGKSVANHAPSMFVSILENKVKSLGGEVVKVDTKNAASQYDFTDGSFTKHELKERNVTLSNGDTHQRDMLAAFNLQHLKYDEAEAKQYDTGAMAADYERFCQLEQEEIQRYKNKEKKDNRGTIGAEKL

SEQ ID NO: 2817 - protein, 483 aa, unidentified
  REGION 1..483: note = Category: MG91 effectors
  REGION 1..483: note = Description: MG91-8 effector
  source 1..483: note = uncultivated organism sequence
MAHKENQKAFVVTFPLRTEKWQEDRIDKMMRMLTTFYNDRQRKLVRRYIYLSHSKAYKEAKGKGVVAFKNYMKEHGFSQYGLDAFFKADTKGALYQCGLNSMFLQYLSQCAWSAWDKKLFGKGDFVKTDKVVNIFCSRNMKGRFCGFDYDLSTFTISIKSTCTKKIICTIPFVVNKKSDYELFALSQKTCRIGIVRKLIRSKSKYYVQFTFDGVPYNKGRNIGTGIVGIDPGPSKIAIVGDKKVELRKLAPNIIEDERKTARLKRKLDRSRRATNPHMYKEDGTNIKGQRQICFSKAYNETRKQLAEAQRKLAAKRKIAHNKLANTLLEYGDTFKVEANSYKSMQARAKTTSMTKSGRIRSKKRYGKSIKNRAPSEFLVILKNKLLRYPKGKYYDVPASYACTQFDFTNESFTQHKISERKIVTSDGIQHNRDTLAAFNIKNAIVNDTSKKKKITKSKEFFDIVRMKASYNEFCLMERYLLSV

SEQ ID NO: 2818 - protein, 521 aa, unidentified
  REGION 1..521: note = Category: MG91 effectors
  REGION 1..521: note = Description: MG91-9 effector
  source 1..521: note = uncultivated organism sequence
MAKEVFVIEFPLKVEKWQSDILNKRYEHLRQLYNYVQGKLLRQYIYFTQMGEYKACKSLKEKKDFFKEHIFHFKGIVGRNKKPLDISFTQYGISGLVSKLGQFSIGGKTYNDIGIGSTILANLAANVWASWDKRLYDIECERISFKKYGELNTFGSGKINKKYFCGFDLHLDRMKLDIKINGRTGKQAKFISLPIRYNLKHVDYEMNALAGGFDSIKVLTVVRRMVRGQYKYYLQMTIEGVKPQKGRHLGKGRVGIDIGPTTIAVSSNSTVSIDKLAAKCDNIEKDIQRINRKLDRSRRTMNPDNFNENGTIKRGVHLIWNNSENYKALRRQKAELQRKQAAVRKMQHIERANSLISEGDTFIIESNPIKGWTARAKETKISEKTGRIQKKKRWGKSVANHAPSMFITILENKVKSLGGTVIKADVKNAASQYDFTDGTFTKHELDERGVTLSNGDTHQRDMLSAFNLQHLIYDAKELKQYDQQRMKSHYPRFCELEQDEIERYRNKVKKDDRCTIAASRL

SEQ ID NO: 2819 - protein, 528 aa, unidentified
  REGION 1..528: note = Category: MG91 effectors
  REGION 1..528: note = Description: MG91-10 effector
  source 1..528: note = uncultivated organism sequence
MNEVFVLELPLQVEKYQADILNKRYEQLRQLYNYVQGKLLRQYRYFEQMKEYQACKTFKEKRDFFRSHPFHIDGILGSNKELFDITFDEYGINGFVGKLGKKQVSAGVTYADLGITSTLLDRLSLAVWAAWEKMLYDYHARRVSFKKYGELNIFGSRKKTNGSGKKMFSGMELHLEKMEVAIKLNGKVGKAAKFITLPILHNPKHVDYEMWALKGGFDSVTVLTIVRRLVRSQYKYYVQLTIEGEKPQKGRTLGKGNVGIDLGPTTVAVCGENVVSIDKLASKCDNIQEKITRLSRKIDRSRRANNPQNFNEDGTIKRGIKLVWKKDKDLKRYSKLKRELAELRRKQAAIRKQQHINRANALLKEGDTFIVENNQISSWTTRAKETKVNEKTGRIQKKKRFGKSVANHAPSMFINILENKVKSLGGKVVKVDTKNAASQYDFTDGSFTKHELKERNVTLSNGDMHQRDILAAFNLQHLKYDEAEAKQYDTEAMSADYERFCQLEQEEIQRYKNKEKKDDRGTIGAEKL

SEQ ID NO: 2820 - protein, 530 aa, unidentified
  REGION 1..530: note = Category: MG91 effectors
  REGION 1..530: note = Description: MG91-11 effector
  source 1..530: note = uncultivated organism sequence
MTSQSFVIELPIAVDDAEMRTIVRKLEFARQLHNATLGTAMGQLQQMRQDAAWKEACVMPKGKERAAAFRALDRKYGLTEYDLHSVIARHREGSGRKAELGINETQKIATRVFQAINRYKLGLGGMPRFKSSKRGLHSIEGKTNKTGLKFRPEKKVLNWCGHDYRVLIDPKDDYIQRALKENERSDKYRKIKYCRLVRKRIRSSDRFFLQVVLEGTAPVKHVYAPVTERAAIDPGPQSIALFSKAFAGKIQVAGSNNFNEAASRRLLRAMDRSLRRNNPDAYNENGTIKKGAKLVKSKNYQRKVDRLREMHRVAAAERKCRHGQTINLLLSIAGDIRIEKNSWKAFQRGHFGKSLGKSAMSGFITQLKSKAASAGLKVTEVNPYKLRLSQYDPYTDTYRKKDLSERWQEMKAGSGQYIQRDVLSALLLYCANIEKEIHIPKVAVEQLEGAKQFLTDAGYVVLKSTSSRDQRDPRLASEPKAMTPEMARQKILRGAGDSHLPTDQELGQIRAGGKVSTWSKETFPLQRGVV

SEQ ID NO: 2821 - protein, 530 aa, unidentified
  REGION 1..530: note = Category: MG91 effectors
  REGION 1..530: note = Description: MG91-12 effector
  source 1..530: note = uncultivated organism sequence
MTFQSFVIELPIAVDDAEMRTIVRKLEFARQLHNATLGTAIGQLQQMRQDTAWKQACAMPKGKERTAAFRALDRKYGLTEYDLHSVIARHREGSGRKAELGINETQKIATRVFQAINRYKLGLGGMPRFKSSKRGLHSIEGKTNKTGLKFRPEKKVLNWCGHDYRVLIDPKDDYIQRALKENERSDKYRKIKYCRLVRKRIRSSDRFFLQVVLEGTAPVKHVYAPVTERAAIDPGPQSIALFSKEFAGKIQVAGSNNFNEAVSRRLLRAMDRSLRRNNPDAYNEDGTIKKGAKLVKSKNYQRKVDRLREMHRVAAAERKCRHGQTINLLLSIAGDIRIEKNSWKAFQRGHFGKSLGKSAMSGFIAQLKSKAASAGLKVTEVNPYKLKLSQYDPYTDTYRKKDLSERWQEMKAGSGLYIQRDILSALLLYCADIEKEIHIPKVAVEQLEGTKQFLTDAGYVVLKSTSSRDQRDPRLASEPKAMTPEMARQKIFRGAGDSHLPTDQELGQIRAGGKVSTWSKETFPLQRGVV

SEQ ID NO: 2822 - protein, 484 aa, unidentified
  REGION 1..484: note = Category: MG91 effectors
  REGION 1..484: note = Description: MG91-13 effector
  source 1..484: note = uncultivated organism sequence
MAHKENQKAFVVTFPLRTEKWQEDRIDKIMRMLTTFYNDRQRKLVRRYIYLSHSKAYKEAKSKGVVAFKNYMKENGFSLYGLDAFFKADTKGALYQCGLNSMFLQYLSQCAWSAWDKKLFGNGDFVKTTKVVNIFCSRNLKGKFCGFDYDLSTFTIRIKSTCTKKIICTIPFVVNEKSYYELFALSQKICRIGIVRKLIRSKYKYYVQFTFDGIPYNKGRNIGTGIVGIDPGPSKIAIVGDNKVEILKLAPNIEEDERKTARLKRKLDRSRRATNPHMYKEDGTIIKGQRQTCFSKAYNETRKQLADAQRKLAAKRKIAHNELANTLLEYGDTFKVEANSYKSMQARAKATSVTKSGRIRSKKRYGKSIKNRAPSEFLVILKNKLLYYPKGKYYDVPASYACTQFDFTNESFTEHKISERKIVTSDGIQHNRDTLAAFNIKNSIVNDTSTKKKKITKSKEFFDIKKMKASYNEFCIMEHHLLSV

SEQ ID NO: 2823 - protein, 484 aa, unidentified
  REGION 1..484: note = Category: MG91 effectors
  REGION 1..484: note = Description: MG91-14 effector
  source 1..484: note = uncultivated organism sequence
MAHKENQKAFVVTFPLRTEKWQEDRIGKMMRMLTTFYNDRQRKLVRRYIYLSHSKAYKEAKGKGVVAFKNYMKENGFSQYGLDAFFKADTKGALYQCGLNSMFLQYLSQCAWSAWDKKLFGKGDFVKTDKVVNIFCSRNMKGRFCGFDYDLSTFTIRIKSTCTKKIICTIPFVVNKNSEYELYALSQKICRIGIVRKLIRSKYKYYVQFTFDGVPYNKGRNIGTGIVGIDPGPSKIAIVGDKKVEIAKLAPNIIEDERKTARLKRKLDRSRRATNPHMYKEDGTNIKGQRQICFSKSYNETRKQLADAQRKLAAKRKIAHNELANTLLEYGDTFKVEANSYKSMQARTKATSMTKSGRIRSKKRYGKSIKNRAPSEFLVILKNKLLHYPNGKYYAVPASYACTQFDFTNESFTEHKISERKIVTSDGIQHNRDTLAAFNIKNAIVNDSSAKKKKITKSKEFFDIVRMKASYNEFCLMERYLLSV

SEQ ID NO: 2824 - protein, 511 aa, unidentified
  REGION 1..511: note = Category: MG91 effectors
  REGION 1..511: note = Description: MG91-15 effector
  source 1..511: note = uncultivated organism sequence
MEKEFFVIELPLKIEKWEADLINKRYELLRSIYNYAQNKLLRQFKYFEQMTEWKNCKTKKNKSDFFKKHPFYFKGISSKITFSEYDITAFVEKLIKKQVSSNKTYKDFGINSSIAESIGKHIWSAWEKKIYNKGEKISFKKKGKLNSISVRKKSGYFGGIDVDLENMLLRLNINGKIGKKSNKITLPIVFDKPTEYEMYSFKNGIDSINVVTIVRKLIRGNYKYYVQFTIEGKKPQKGRVLGKGKVGVDVGPSTVAVSSINGVQIITLAEKCDGIEHKCKLLERKMDRSRRATNPQNYNDNGTIKKIKNEHLKWVYSKRYSKIRNKKCELQRKQAAIRKLQHNINTNELLKFGDSFIVENNPISAWQHKAKETKINKNGKIQSKKRFGKSIANHAPAMFITILENKVKSLGGELIKVDIKNAASRFDFTNSDFVEHKLNERKITLSNGNTHQRDLLAAFNLQHLNSDDESLKSYNIEEMKKDYPIFCKLEETEIDKFVNGQKKSHKYTVGY

SEQ ID NO: 2825 - protein, 530 aa, unidentified
  REGION 1..530: note = Category: MG91 effectors
  REGION 1..530: note = Description: MG91-16 effector
  source 1..530: note = uncultivated organism sequence
MTSQSFVIELPIAVDDAEMRTIVRKLEFARQLHNATLGTAMGQLQQMRQDAAWKEACVMPKGKERAAAFRALDRKYGLTEYDLHSVIARHREGSGRKAEQGINETQKIATRVFQAINRYKLGLGGMPRFKSSKRGLHSIEGKTNKTGLKFRPEKKVLNWCGHDYRVLIDPKDDYIQRALKENERSDKYRKIKYCRLVRKRIRSSDRFFLQVVLEGTAPVKHVYAPVTERAAIDPGPQSIALFSKAFAGKIQVAGSNNFNEAASRCLLRAMDRSLRRNNPDAYNENGTIKKGAKLVKSKNYQRKVDRLREMHRVAAAERKCRHGQTINLLLSIAGDIRIEKNSWKAFQRGHFGKSLGKSAMSGFIAQLKSKAASAGLKVTEVNPYKLRLSQYDPYTDTYRKKDLSERWQEMKAGSGLYIQRDVLSALLLYCADIEKEIHIPKVAVEQLEGAKQFLTDAGYVVLKSTSSRDQRDPRLASEPKAMTPEMARQKIFRGAGDSHLPTDQELGQIRAGGKVSTWSKETFPLQRGVV

SEQ ID NO: 2826 - protein, 484 aa, unidentified
  REGION 1..484: note = Category: MG91 effectors
  REGION 1..484: note = Description: MG91-17 effector
  source 1..484: note = uncultivated organism sequence
MAHKENQKAFVVTFPLRTEKWQEDRIDKIMRMLTTFYNDRQRKLVRRYIYLSHSKAYKEAKGKSVVAFKNYMKENGFSQYGLDAFFKADTKGALYQCGLNSMFLQYLSQCAWSAWDKKLFGNGDFVKTTKVVNIFCSRNQKGKFCGFDYDLSTFTIRIKSTCTKKIICTIPFIVNKKSDYELFALSQKICRIGIVRKLIRSKYKYYVQFTFDGIPYNKGRNIGTGIVGIDPGPSKIAIVGDNKVEILKLAPNIEEDERKTARLKRKLDRSRRATNPHMYKEDGTTIKGQRQTCFSKAYNETRKQLADAQRKLAAKRKIAHNELANTLLEYGDTFKVEANSYKSMQARTKATSVTKSGRIRSKKRYGKSIKNRAPSEFLVILKNKLLYYPKGKYYDVPASYACTQFDFTNESFTEHKISERKIVTSDGIQHNRDTLAAFNIKNSIVNDTSTKKKKITKSKEFFDIKKMKASYNEFCIMEHHLLSV

SEQ ID NO: 2827 - protein, 525 aa, unidentified
  REGION 1..525: note = Category: MG91 effectors
  REGION 1..525: note = Description: MG91-18 effector
  source 1..525: note = uncultivated organism sequence
MNEVFVLELSLQVEKYQADILNKRYEQLRQLYNYVQGKLLRQYRYFEQMKEYQACKTFKEKRDFFRSHPFHIDGILGSNKEPFDITFDEYGINGFVGKLGKKQVSTGVTYADLGITSTLLDRLSLAVWAAWDKMLYDYHAHRVSFKKYGELNIFGSRKKTNGSGKKVFSGMELHLEKMEVAIKLNGKVGKAAKFITLPILHNPKHADYEMWALKGGFDSVTVLTIVRRLVRSQYKYYVQLTIEGEKPQKGRTLGKGNVGIDLGPTTVAVSGENVVSIDKLASKCDNIQEEITRLSRKIDRSRRANNPQNFNEDGTIKRGIKLVWNDSKRYKELRRELAELRRKQAAIRKQQHIDRANALLKEGDRFIVENNQISGWTTRAKETKVNERTGKIQKKKRFGKSVANHAPSMFVSILENKVKSLGGEVVKVDTKNAASQYDFTDGSFTKHELKERNVTLSNGDTHQRDMLAAFNLQHLKYDEAEAKQYDTEAMAADYERFCQLEQEEIQRYKNKEKKDDRGTIGAGDL

SEQ ID NO: 2828 - protein, 494 aa, unidentified
  REGION 1..494: note = Category: MG91 effectors
  REGION 1..494: note = Description: MG91-19 effector
  source 1..494: note = uncultivated organism sequence
MARENEDSGCFVVTFPLKTEKWQEDRIDKILNLLTVRYREKQKTLLDRYIHLSHSPEFKEAKNAGLKAFRDFMNEHKFTKFDIQKVFSDSSLSKSATTDVMLTHGINSDIMEELSHRAWSAWEKKLYGQGKFIRLDNEVNIFKSRRHKEHITGFEYSFTDMTLSMNATKPKKHTMFTIPFVVNRKREYEAYALGCEVRNIAIVRQQIRGKNKYYVQFSFAGTPYNKGRKIGTGIVGIDPGPSKIAIVSDSEIRITTLAPSVKRDERAVCRMQRKLDRSRRATNPDNYNDDGTIKRGIKLKFEKSNSYKRTQAKLADMQRKLAAKRKIDHNILANEIITMGNEFHVENNSFKSMQARSKETKKNDKGKNLSKKRFGKSLANRAPSELLTILKNKVCQYADGEYVDIPSGVSCTQFDFTNGEFTKHELKERIITTSDGFVHDRDALAAFNMRFVNRQRIEGKKKVEKDKENFDLQAMTKAYKQFCALEENIKNRDK

SEQ ID NO: 2829 - protein, 375 aa, unidentified
  REGION 1..375: note = Category: MG91 effectors
  REGION 1..375: note = Description: MG91-20 effector
  source 1..375: note = uncultivated organism sequence
MLNWCGHDYRVLIDPKDDYIQRALKENERSDKYRKIKYCRLVRKRIRSSDRFFLQVVLEGTAPVKHVYAPVTERAAIDPGPQSIALFSKEFAGKIQVAGSNNFNEAVSRRLLRAMDRSLRRNNPDAYNEDGTIKKGAKLVKSKNYQRKVDRLREMHRVAAAERKCRHGQTINLLLSIAGDIRIEKNSWKAFQRGHFGKSLGKSAMSGFIAQLKSKAASAGLKVTEVNPYKLRLSQYDPYTDTYRKKDLSERWQEMKAGSGLYIQRDVLSALLLYCADIEKEIHIPKVAVEQLEGAKQFLTDAGYVVLKSTSSRDQRDPRLASEPKAMTPEMARQKIFRGAGDSHLPTDQELGQIRAGGKVSTWSKETFPLQRGVV

SEQ ID NO: 2830 - protein, 528 aa, unidentified
  REGION 1..528: note = Category: MG91 effectors
  REGION 1..528: note = Description: MG91-21 effector
  source 1..528: note = uncultivated organism sequence
MNEVYVLELPLRVEKYQADILNKRYEQLRQLYNYVQGKLLRQYRYFEQMREFQDCKTFKAKREFIKSHPFHVNGVIGRNKELLDIFFDEYGIQGFVAKLGQKPIGSGMNYTDMGISSTILANLSANIWSAWNKKLYDYRAERIAFKRYGGLNTFGSGKIVQKKDGEVKEYFPGMVLRLESMELDIKTNGKLGKNAKFITLPILHNPKHADYEMWALKGGMRSVKVLTVVRRMVRNQYKYYLQMSIEGEKPQKGRTLGKGNVGIDLGPTTVAVSGENIVSIDKLASKCDNIQKEITRLARKIDRSRRANNPQNFNEDGTVKRGIKLVWNDSNRYKELRREMAELQRRQAAIRKQQHIDRANELLKEGDTFIVENNQISGWTRKAKETKVNEKTGKIQKKKRFGKSVANHAPAMFVTILENKVKSLGGEVVKVDTQNAASQYDFTNDSFEKHELKERSVTLSNGDTHQRDMLAAFNLQHLKYDDKEKKQYDTEAMKEHYERFCEMEQEEITRYKNKEKKDDRTTIGASDL

SEQ ID NO: 2831 - protein, 383 aa, unidentified
  REGION 1..383: note = Category: MG91 effectors
  REGION 1..383: note = Description: MG91-22 effector
  source 1..383: note = uncultivated organism sequence
MFLQYLSQCAWSAWDKKLFGKGDFVKTDKVVNIFCSRNMKGRFCGFDYDLSTFTIRIKTTCTKKIICTIPFVVNKNSEYELYALSQKICRIGIVRKLIRSKYKYYVQFTFDGVPYNKGRNIGTGIVGIDPGPSKIAIVSDEKVEIAKLAPGIEEDERKTARLRRKLDRSRRATNPHMYKEDGTIIKGQRQTYFSKVYNETRKQLADAQRKLAAKRKIAHNELANTLLEYGDTFKVEANSYKSMQARTKATSMTKSGRIRSKKRYGKSINNRAPSEFLVILKNKLLYYPKGKYYDVPSSYACTQFDFTNESFTEHKISERRIVTSDGIQHNRDTLAAFNIKNAIVNDTSTKKKKITKSKEFFDIVKMKASYNEFCVKERYLLSV

SEQ ID NO: 2832 - protein, 543 aa, unidentified
  REGION 1..543: note = Category: MG91 effectors
  REGION 1..543: note = Description: MG91-23 effector
  source 1..543: note = uncultivated organism sequence
MEKEMFVIEFPLKVEKWQADILDKRYEHLRKIYNYAQGKLVRQYDYLTQMKEYRRHGFSKEYEGMLVERGYEKALRAIKAAKDQFFRNHPFHVSGVSDSSGKPMNITFSSFGIPGFIEKLASHRIGADTTYGDLGINSIILGLLGKQLWSAWDRMINDPNTEKVSFKKYGELNSFATRVKGKEGKKVSSGMNLYLDTMTLDIKVNGKTGRNAKFISLPIVYNLKHADYEMNALHGGLESIKVIKVLRRLVRGKYKYYLQLTIGDEKPQKGRQLGKGRVNIDLGLTKIAVYSDAGVMVRPLAPSTEKIDHQILLVQRKMDRSRRANNPGYFNADGTIKELEKGERRRWMNSEEYKRLRMQKAELQRRQAAVRKQDHISLANELLKLGNLFVIEDNDVKEWQQRKKEAIRREEDGKNLSQAGFGKHVANHAPAMFVTILENKVKSLGGTLVKVDTNNGATEYDFTNDTFTKHDLTERYITLSDGKRHQRDTLAAFNLGFLNLDPQKKRSYNRENMRGHYDRFCQMEEIALKSYRSQSAVGAVNNL

SEQ ID NO: 2833 - protein, 484 aa, unidentified
  REGION 1..484: note = Category: MG91 effectors
  REGION 1..484: note = Description: MG91-24 effector
  source 1..484: note = uncultivated organism sequence
MAHKENQKAFVVTFPLRTEKWQEDRIDKMMRMLTTFYNDRQRKLVRRYIYLSHSKAYKEAKGKGVVAFKNYMKENGFSQYGLDAFFKADTKGALYQCGLNSMFLQYLSQCAWSAWDKKLFGKGDFVKTDKVVNIFCSRNKKERFCGFDYDLSTFTISIKSTCTKKIICTIPFVVNKKSDYELFALSQRICRIGIVRKLIRGKYKYYVQFTFDGVPYHKGRNIGTGIVGIDSGPSKIAIVGDNKVEIAKLAPNIEEDERKTARLKRKLDRSRRATNPHMYKEDGTIIKGHCQTCFSKVYNETRKQLADAQRKLAAKRKIAHNELANTLLEYGDTFKVEANSYKSMQARTKATSMTKSGRIRSKKRYGKSIKNRAPSEFLVILKNKLLHYPNGKYYAVPASYACTQFDFTNESFTEHKISERKIVTSDGVQHNRDTLAAFNIKNAIVNETSTKKKKITKSNEFFDIVRMKASYNEFCLMERYLLSI

SEQ ID NO: 2834 - protein, 607 aa, unidentified
  REGION 1..607: note = Category: MG91 effectors
  REGION 1..607: note = Description: MG91-25 effector
  source 1..607: note = uncultivated organism sequence
MAKEEFVLTLPLKVEKWQADILDKRYELLRQVYNMVQQKLVRQYIYFSQQKAYRDCKSFEQKREFFENHPFHIKGVKGRNGELCDVKFPYTYRSRGGPSGKRAPNGISDFVSKLGSRKIGEDKTLADFGINSIILEELGLHIMRAWETRLYKPKSSRVSYREYGDINSFGSRKINTNFTGFTINIEDRYIAFNTNGRRGQFADFIQLPIDFSREKNGYAREALNGGIESLKKLLIVRKCIRGGNKYYLQLTISGEKPQKGRTLGKGNVGIDIGPSTIATSSLKGVHFDKLADKCDNIEHELYLINRKLDRSRRANNPQNYNEDGTIKRGIRLVWKKDKDAKRYATLKQQRKELYRKQAEIRKQQHLEMANAMLSQGDTFIVENNPIDAWVRRAKETTKTKTGKNRCKKRYGKSVANHAPSMLVSILKNKVLSLGGNFYEIDPRNAATQFDFTNGEFTKHEVSERSITLSNGCSHQRDMLSAFNLQHIVLQSKELKEYDIEQMEADYPIFCRLESAEQERFKDARHKERDALYYVGASKKQMRRNPQEKSVANRHNGGVGRKHCNTSLGNENAEITGSGLARESIERVSQVPDEYHPFGCDPIVLDGL

SEQ ID NO: 2835 - protein, 521 aa, unidentified
  REGION 1..521: note = Category: MG91 effectors
  REGION 1..521: note = Description: MG91-26 effector
  source 1..521: note = uncultivated organism sequence
MAKEVFVIEFPLKVEKWQADILNKRYEHLRRLYNYVQSKLLRQYIYFTQMQDYKKCKTLKEKKNFFKEHVFHIKGILGRNKSPLDITFTEYGILGMVTKLSQLSMGGKSYSDIGIGFTILANLADNIWAAWNKRLYDFECERISFKKYGSLDTFGSGKINNKYFCGFDLHLDRMTLDIKINGRTGKQAKFISLPIRYNMKHVDYEMNALAGGFDSIKVLTVVRRMVRGQYKYYLQMTIEGVKPQKGRHLGKGRVGIDIGPTTIAVSSNSTVSIDKLAAKCDNIEKDIQRINRKLDRSRRTMNPDNFNEDGTIKRGVRLIWNNSENYKALRRQKAELQRKQAAVRKMQHIERANSLLSEGDTFIVENNPIKGWAAKAKETKVSEKTGKIQKKKRWGKSVANHSPAMFVTILENKVKSMGGTVIKADVKNAASRYDFTDGSFTKHDLDERGVTLSNGDTHQRDMLAAFNLQHLIYDAEKPKQYDQLRMKSHYPRFCELEQDEIERYRNKVKKDDRCTIAASRL

SEQ ID NO: 2836 - protein, 530 aa, unidentified
  REGION 1..530: note = Category: MG91 effectors
  REGION 1..530: note = Description: MG91-27 effector
  source 1..530: note = uncultivated organism sequence
MTSQSFVIELPIAVDDAEMRTIVRKLEFARQLHNATLGTAIGQLQQMRQDTAWKQACAMPKGKERTAAFRALDRKYGLTEYDLHSVIARHREGSGRKAELGINETQKIATRVFQAINRYKLGLGGMPRFKSSKRGLHSIEGKTNKTGLKFRPEKKVLNWCGHDYRVLIDPKDDYIQRALKENERSDKYRKIKYCRLVRKRIRSSDRFFLQVVLEGTAPVKHVYAPVTERAAIDPGPQSIALFSKEFAGKIQVAGSNNFNEAVSRRLLRAMDRSLRRNNPDAYNEDGTIKKGAKLVKSKNYQRKVDRLREMHREAAAERKCRHGQTINLLLSIAGDIRIEKNSWKAFQRGHFGKSLGKSAMSGFIAQLKSKAESAGLKVTEVNPYKLKLSQYDPYTDTYRKKDLSERWQEMKAGSGQYIQRDVLSALLLYCANIEKEIHIPKVAVEQLEGAKQFLTDAGYVVLKSTSSRDQRDPRLASEPKAMTPEMARQKILRGAGDSHLPTDQELGQIRAGGKVSTWSKETFPLQRGVV

SEQ ID NO: 2837 - protein, 526 aa, unidentified
  REGION 1..526: note = Category: MG91 effectors
  REGION 1..526: note = Description: MG91-28 effector
  source 1..526: note = uncultivated organism sequence
MNEVFVLELPLQVEKYQADILNKRYEQLRQLYNYVQGKLLRQYRYFEQMKEYQACEKIKEKRDFFRSRPFQINETLKGIETPVKLSFEEYSIKGYIEKLVQKSVGANMTYADLGFTTNILDYLGAGVWAAWDKKLYDFKAKRVSFKKYGELDSFSSRRKVVRGVVYFSGMELHLDTMELAIKMNGKVGKESRFITLKMLHNPKHADYEMWALKGGVESVKVVKVVRRLVRSQYKYYVQLTIEGEKPQKGRTLGKGNVGIDLGPTTVAVSGENVVSIDKLASKCDNIQEEITRLSRKIDRSRRANNPQNFNEDGTIKRGIKLVWNDSKRYKELRRELAELRRKQAAIRKQQHIERANALLKEGDTFIVENNKISSWTTRAKETKVNEKTGKIQKKKRFGKSVANHAPSMFVSILENKVKSLGGEVVKVDTKNAASQYDFTDGSFTKHELKERNVTLSNGDIHQRDMLAAFNLQHLKYEEAEAKQYDTKAMADDYERFCQLEQEEIQRYKTKEKKDDRGTIGAEKLIK

SEQ ID NO: 2838 - protein, 524 aa, unidentified
  REGION 1..524: note = Category: MG91 effectors
  REGION 1..524: note = Description: MG91-29 effector
  source 1..524: note = uncultivated organism sequence
MTEVFVLELPLQVEKYQADILNRRYEQLRQLYNYVQGKLLRQYRYFEQMKEYQACKTFKDKKDFLKKHPFQVKGVYGSNKELLDITFDEYGIQGFVSKLGKKCVCSNTTYADLGITSTILDRLSLAVWSSWEKMLYSFQTKRLSFKKFGELDTISNRRIVARGKVCFPGMELHLEKMELAIKLNGKTGKNAKFITLPILHNPKHADYEMWALKGGIDSVKVITVVRRLVRGQYKYYVQLSIEGEKPLKGRTLGKGNVGIDLGPTTVAISGNNNVSIDKLAPKCDNTQREITRLSRKIDRSRRANNPQNFNEDGTIKRGIRLVWNDSKRYKALRRELAELQRRQAAIRKQQHIDRANELLKEGDTFIVENNSISGWAAKAKETKVSEKTGKIQKKKRFGKSIANHAPAMFVNILENKVKSLGGQVVKVDTKNAASQYDFTDNSLEKHELNERNVTLSNGDTHQRDMLAAFNLQHLKYDAKESKQYDVEAMNKDYDRFCQLEEAEIMRYKNKEKKDDRSTIGVGKL

SEQ ID NO: 2839 - protein, 353 aa, unidentified
  REGION 1..353: note = Category: MG91 effectors
  REGION 1..353: note = Description: MG91-30 effector
  source 1..353: note = uncultivated organism sequence
MKKSVSIKVAAKVNTNISDEKPKDLRNRFLSTQNYRLLSAVSRFATDYVQGIIRVNDLVEMKCNELKGQDLIDSAVCQGDCRKKFSKGAKYLFCVVDSAADVNDVAVRWNKFKLVCNTCSNDYAFNAQYEVMQLYPTVSLADVERLCAVGFLTKYIFPINLEYTESRTETEVPGYHNFYKIVKSIVKDKKHNEQITKIQLCTYGRDLFTETDYDCAMKSGVDAYGGMTFELDFYPHDSNMMTFLETYKDTKPLTYFYRVTKRIYSSRFDYVVYFPIKCTRYCKFCKASKIYAKNNPVLYCSQCGFTDAMFFKNSPLLSTVTFFDECVKSKTLKPKRIFYYDMALYKTMIKKVK

SEQ ID NO: 2840 - protein, 527 aa, unidentified
  REGION 1..527: note = Category: MG91 effectors
  REGION 1..527: note = Description: MG91-31 effector
  source 1..527: note = uncultivated organism sequence
MNEVFVLELPLQVEKYQEDILDKRFEQLRQLYNYVQGKLLRQYRYFEQTKEFQACKTIKEKRDFFRNHPFHFNGIYGNNNELFNITFDEYGVNGFVSKMAKKQVGANMTYADLGITTTLLDRLSLAIWASWEKKMYDYHTKRISFKKHGELNIFGSRKKTNGSGKKMFSGMELNLERMEVSIKLNGKVGKKAKYITLPILHNPKHVDYEMMALKGGFDSVKVITVVRRLVRGRYKYYLQMSIEGEKPKKDRTLGKGNVGIDIGPTTVAVSGENIASIDKLASKCDSIEAEKARLGRKIDRSRRANNPQNFNEDGTIKRGVRLVWNDSKRYKVLRREMTELQRRQAAIRKQQHIDRANELLKEGDTFIVENNQISGWTRKAKETKVNEKTGKIQKKKRFGKSVANHAPSMFVTILENKVKSLGGQVVKVDTKNAASQYDFTNDSFEKHELNERSVTLSNGDTHQRDMLAAFNLQHLKYDAQEKKQYDREAMTQHYDRFCKLERAEIMRYKNKEKRDDRSTIGAGELNT

SEQ ID NO: 2841 - protein, 525 aa, unidentified
  REGION 1..525: note = Category: MG91 effectors
  REGION 1..525: note = Description: MG91-32 effector
  source 1..525: note = uncultivated organism sequence
MNSDTFIMELPLIVEKFQSDELDKRFEILRRIYNMAQNKLERQFCYLSKFKEYQECTTKKAKGEFIKKHPFSFKDILDKSGNPLMITFTKYDIQGYLSKFAKLKIDSQYTYSDMGINTSMLMHMGMAIWSAWEKVIFDSKADKISYKKYGDLKSIGVDWEPKHPAGFILNLRKGELKLNLNNRQGQYARYITMKIRFGKKEHQVWYEGDALNAGEDSIRVLTIVRRKIRGRYNYYLQMTIRNNKPQKGRTLGEGRVAIDLGTSKIAVVAKDKVHLLPLSPSILSVSDELRIIQRQMDRSRRANNPHKYHEDGTVKKGNHDKWVNSKEYIRLRNMKAELERKQAAVRKQDHIALANYLLSLGNEFVIEDNDVQEWAKRKKEEKRRKSDGKNLSKAGLGKQIGNHAPSMFVTILKNKVESLGGTFVKVDNNNRATDYDFTNNTFNEHKLEERYITLGNGNRHQRDTLAAFNLYHLDTAPEKEKCYNLYEMRKHYAQFCEFEKEALLRWKGMTPKREKMKVREHERGL

SEQ ID NO: 2842 - protein, 607 aa, unidentified
  REGION 1..607: note = Category: MG91 effectors
  REGION 1..607: note = Description: MG91-33 effector
  source 1..607: note = uncultivated organism sequence
MAKEEFVLTLPLKVEKWQADILDKRYELLRQVYNMVQQKLVRQYIYFSQQKAYRDCKNFEQRRGFFEAHPFHVKSVKGKNGELCDIKFPYTYKSRGGSSGKRAPNGISDYVSKLWSHKIGQNKTLADFGINSYIMEELGLHIMKAWEDRLYKPKSKRVSFKDYGEINSFGSRNKNGNFAGFTINLDNGIITYKTNGRQGQFADLIQLPIDFSREKNGYASEALKGGIESLKKLLIVRRCIRGENKYYLQLTISGEKPQKGRTLGKGNVGIDIGPSTIATSSLNGVYFDKLADKCDNIEHELYLINRKLDRSRRANNPQNYNEDGQIKRGVRLVWKKDKDVKRYTTLKLQRKELYRKQAEIRKLQHLEMANAMLSEGDTFIVENNPIDAWVRRTKETTKTKAGKNRCKKRYGKSVANHAPAMFVSILKNKVLSLGGKFYEIDPRNAATQFDFSNGEFTKHEVSERSITLSNGRTHQRDMLSAFNLQHIVLQNKELKEYDIEQMEADYPIFCRLENTELERFKEARHKERDALYFVGASEKQMRRQPQEESVANRHNGGVGRKHCNTSLGGGNAKITGNGLARESIERVSQVPDERHLSGCVPISLDGL

SEQ ID NO: 2843 - protein, 484 aa, unidentified
  REGION 1..484: note = Category: MG91 effectors
  REGION 1..484: note = Description: MG91-34 effector
  source 1..484: note = uncultivated organism sequence
MAHKENQKAFVVTFPLRTEKWQEDRIDKMMRMLTNFYNDRQRKLVRRYIYLSHSKAYKEAKSKGVVAFKNYMKEHGFSQYGLDAFFKADTKGALYQCGLNSMFLQYLSQCAWSAWDKKLFGKGDFVKTDKVVNIFCSRNMKGSFCGFDYDLSTFTIRIKSTCTKEIICTIPFVVNKNSEYELYALSQKICRIGIVRKLIRSKYKYYVQFTFDGVPYNKGRNIGTGIVGIDPGPSKIAIVGDNKVEIAKLAPGIEEDERKTARLKRKLDRSRRATNPHMYKEDGTNIKGQRQICFSKSYNETRKQLAEAQRKLAAKRKIAHNELANTLLEYGDTFKVEANSYKSMQARTKATSMTKSGRIRSKKRYGKSIKNRAPSEFLVILKNKLLHYPNGKYYAVPASYACTQFDFTNESFTEHKISERKIVTSDGVQHNRDTLAAFNIKNAIVNETSTKKKKITKSNEFFDIVRMKASYNEFCLMERYLLSI

SEQ ID NO: 2844 - protein, 383 aa, unidentified
  REGION 1..383: note = Category: MG91 effectors
  REGION 1..383: note = Description: MG91-35 effector
  source 1..383: note = uncultivated organism sequence
MFLQYLSQCAWSAWDKKLFGKGDFVKTDKVVNIFCSRNKKERFCGFDYDLSTFTISIKSTCTKKIICTIPFVVNKKSDYELFALSQRICRIGIVRKLIRGKYKYYVQFTFDGVPYNKGRNIGTGIVGIDSGPSKIAIVGDEKVEIAKLAPNIEEDERKTARLKRKLDRSRRATNPHMYKEDGTNIKGQRQTCFSKVYNETRKQLADAQRKLAAKRKIAHNELANTLLEYGDTFKVEANSYKSMQARTKATSMTKSGRIRSKKRYGKSIKNRAPSEFLVILKNKLLHYPNGKYYAVPASYACTQFDFTNESFTEHKISERKIVTSDGVQHNRDTLAAFNIKNAIVNETSAKKKKITKSKEFFDIVRMKASYNDFCLMERYLLSV

SEQ ID NO: 2845 - protein, 530 aa, unidentified
  REGION 1..530: note = Category: MG91 effectors
  REGION 1..530: note = Description: MG91-36 effector
  source 1..530: note = uncultivated organism sequence
MTSQSFVIELPIAVDDAEMRTIVRKLEFARQLHNATLGTAIGQLQQMRQDTAWKQACAMPKGKERTAAFRALDRKYGLTEYDLHSVIARHREGSGRKAELGINETQKIATRVFQAINRYKLGLGGMPRFKSSKRGLHSIEGKTNKTGLKFRPEKKVLNWCGHDYRVLIDPKDDYIQRALKENERSDKYRKIKYCRLVRKRIRSSDRFFLQVVLEGTAPVKHVYAPVTERAAIDPGPQSIALFSKEFAGKIQVAGSNNFNEAVSRRLLRAMDRSLRRNNPDAYNEDGTIKKGAKLVKSKNYQRKVDRLREMHREAAAERKCRHGQTINLLLSIAGDIRIEKNSWKAFQRGHFGKSLGKSAMSGFIAQLKSKAASAGLKVTEVNPYKLKLSQYDPYTDTYRKKDLSERWQEMKAGSGQYIQRDVLSALLLYCADIEKEIHIPKVAVEQLEGAKQFLTDAGYVVLKSTSSRDQRDPRLASEPKAMTPEMARQKILRGAGDSHLPTDQELGQIRAGGKVSTWSKETFPLQRGVV

SEQ ID NO: 2846 - protein, 614 aa, unidentified
  REGION 1..614: note = Category: MG91 effectors
  REGION 1..614: note = Description: MG91-37 effector
  source 1..614: note = uncultivated organism sequence
MAKENFVLTLPLKVEKWQADILDKRYELLRQVYNMVQQKLLRQYIYFSQQKAYKECKTFQQKREFFDSHPFYIKIDDKPCEIKFPYTKKNSNTAPNTISNYVSGLGSHRVGQDKTLSNLGINSIILEELGIHIMKAWGDRIYNSKSEHISFKKYGEVNSLVSRYKKKKQTGKVYFPGFTINLEERYITYNTNGRQGNQAKLIKLPIDFSREKKRYAAEALKDGIDSIRKLSVVRRCIRGKNKYYLQLVIDGEKPQKGRTLGRGNVGIDIGPSTIATSSLLGVHFDKLADKCDNIEHELYLIDRKLDRSRRANNPQNYNEDGTYKRGVRLVWKKDSEVKRYAKLKAARKELYRRQAEIRRRQHLEMANAMLQLGDTFIVENNPIDAWARRAKETKKTKSGRTRCKKRYGKSIAHHAPAMFVTMLENKVKSLGGEFYRVDAYGYAATQFDFTNKKFTKHAVNERSITLSNGHTHQRDMLSAFNLQHARLEGEKTKSRDKEKKVESYDIEQMQADYPIFCRLEAEEQKRFRVAWHNEKDALYFVGASGKQLRHQSQEKSAANRHNGGVDRNHCNTRLGKENAEITGSGFARESIARVSQVPDEYHQHGQQSIIIDGL

SEQ ID NO: 2847 - protein, 372 aa, unidentified
  REGION 1..372: note = Category: MG91 effectors
  REGION 1..372: note = Description: MG91-38 effector
  source 1..372: note = uncultivated organism sequence
MIRNLKIECFVRDNDLHAKIRASVRLYRACLRAAFSYCALAETAGAEIVAENGNVTVKPNDEKAREILSACVGHSGKIKYYEMYHWMKELYPSLISNCYSKIQYIIGKMMTMKDQDIKKCQKKFLIVNGKRAFAQFNRSGIPIKSGMAKIDGHLLKCRWDKDIGEVEFTTNKMDSSTYYAFSSLREGWEGWSIKDSYLSFDEDKNKIVVILSYERPDTPTNIEPEKVMHVEFTDDKEMFITCYTDDKWSARPFSAAGIIGYLEEMEQIYSRYWSEFKSYERRERKQRNHVKEKLNRYTERRANAEKNNNHLWSKRIVDFARQQCAGKLVVVNLPEKTLFDLPYGWFDFKTKLDYKMKEIGGTVSFVTVDKDK

SEQ ID NO: 2848 - protein, 614 aa, unidentified
  REGION 1..614: note = Category: MG91 effectors
  REGION 1..614: note = Description: MG91-39 effector
  source 1..614: note = uncultivated organism sequence
MAKENFVLTLPLKVEKCHADILDKRYELLRQIYNMVQQKLVRQYIYFSQQKAFKACENFDQKREFFNKHPFHFKGIKGKNGELSDIKFPYTYESRSSSSGKRPSGGISDYVAKLWSHKVGADKRLVDFGLNASIMEELGLHIMKAWEDRLYKFKAKRVSFKEYGEINTLGCRLKGNFAGFTINLEEGFITFNTNGRHGKFADLIKLPIDFSREKRGYAEDALKGGVDSLRKLVIVRRCIRGRNKYYLQLTISGEKPQKGRTLGIGDVGIDIGPSTIATSSLQGVHFDKLAEKCDNIEHELYLINRKLDRSRRANNPDNYNHDGTIKRGVRLVWKKDKDVKRYASLKQQRKELFRRQAEIRKLQHLEMANAMLSQGDTFIVENNPIDAWVRRAKETKKTKTGKNRSKKRYGKSVANHAPAMFVTILENKVKSLGGVFYKVDPGYAATQFDFTNGVFTKHEVSERSITLSNGRTHQRDMLSAFNLQHARLEVEKAKSRDKEKKVESYDIGQMQADYPIFCRLETAEQERFKNARRNERDALYFVGALAKELRHAPQEETVANRHNGGVGRKHCNTLCPENAKITGNGLVRESVARVSEAPEECYHTGDQPIILDGL

SEQ ID NO: 2849 - protein, 484 aa, unidentified
  REGION 1..484: note = Category: MG91 effectors
  REGION 1..484: note = Description: MG91-40 effector
  source 1..484: note = uncultivated organism sequence
MAHKENQKAFVVTFPLRTEKWQEDRIDKMMRMLTTFYNDRQRKLVRRYIYLSHSKAYKEAKGKGVVAFKNYMKENGFSQYGLDAFFKADTKGALYQCGLNSMFLQYLSQCAWSAWDKKLFGKGDFVKTDKVVNIFCSRNKKERFCGFDYDLSTFTISIKSTCTKKIICTIPFVVNKKSDYELFALSQRICRIGIVRKLIRGKYKYYVQFTFDGVPYHKGRNIGTGIVGIDPGPSKIAIVGDNKVEIAKLAPNIEEDERKTARLKRKLDRSRRATNPHMYKEDGTIIKGQRQTCFSKVYNETRKQLADAQRKLAAKRKIAHNELANTLLEYGDTFKVEANSYKSMQARTKATSMTKSGRIRSKKRYGKSIKNRAPSEFLVILKNKLLHYPNGKYYAVPASYACTQFDFTNESFTEHKISERKIVTSDGVQHNRDTLAAFNIKNAIVNETSTKKKKITKSNEFFDIVKMKASYNEFCLMERYLLSI

SEQ ID NO: 2850 - protein, 484 aa, unidentified
  REGION 1..484: note = Category: MG91 effectors
  REGION 1..484: note = Description: MG91-41 effector
  source 1..484: note = uncultivated organism sequence
MAHKENQKAFVVTFPLRTEKWQEDRIDKMMRMLTTFYNDRQRKLVRRYIYLSHSKAYKEAKGKGVVAFKNYMKENGFSQYGLDAFFKADTKGALYQCGLNSMFLQYLSQCAWSAWDKKLFGKGDFVKTDKVVNIFCSRNKKERFCGFDYDLSTFTISIKSTCTKKIICTIPFVVNKKSDYELFALSQRICRIGIVRKLIRGKYKYYVQFTFDGVPYHKGRNIGTGIVGIDSGPIKIAIVGDNKVEIAKLAPNIEEDERKTARLKRKLDRSRRATNPHMYKEDGTIIKGQRQTCFSKVYNETRKQLADAQRKLAAKRKIAHNELANTLLEYGDTFKVEANSYKSMQARAKATSMTKSGRIRSKKRYGKSIKNRAPSEFLVILKNKLLYYPKGKYYDVPSSYACTQFDFTNESFTEHKISERRIVTSDGIQHNRDTLAAFNIKNAIVNDTSTKKKKVTKSKEFFDIVRMKASYNEFCLMERYLLSV

SEQ ID NO: 2851 - protein, 528 aa, unidentified
  REGION 1..528: note = Category: MG91 effectors
  REGION 1..528: note = Description: MG91-42 effector
  source 1..528: note = uncultivated organism sequence
MNEVFVLELPLRVEKYQADILNKRYEQLRQLYNYVQGKLLRQYRYFEQMREFQDCKTFKAKREFIKSHPFHVNGVIGRNKELLDIYFDEYGILGFVAKLGQKPIGSGMNYTDMGISSTILSNLSANIWSAWNKKLYDYRAERIAFKRHGGLNTFGSGKIVQKKDGEVKEYFPGMVLRLESMELDIKTNGKLGKNAKFITLPILHNPKHADYEMWALKGGMRSVKVLTVVRRMVRGQYKYYLQMSIEGEKPQKGRTLGKGNVGIDLGPTTVAVSGENIVSIDKLASKCDNIQKEITRLARKIDRSRRANNPQNFNEDGTVKRGIKLVWNDSKRYKELRREMAELQRRQAAIRKQQHIDRANELLKEGDTFIVENNQISGWTRKAKETKVNEKTGKIQKKKRFGKSVANHAPAMFVTILENKVKSLGGEVVKVDTQNAASQYDFTNDSFEKHELKERSITLSNGDTHQRDMLAAFNLQHLKYDDKEKKQYDTEAMKEHYERFCELEQEEIQRYKDKEKKDDRSTIGAEKL

SEQ ID NO: 2852 - protein, 524 aa, unidentified
  REGION 1..524: note = Category: MG91 effectors
  REGION 1..524: note = Description: MG91-43 effector
  source 1..524: note = uncultivated organism sequence
MIEVFVLELPLQVEKFQADILNKRFEQLRQLYNYVQGKLLRQYRYFEQMREFQACKTIKEKRDFFRTHPFHINGVLDRRGDLLDITFDEYGIQGFVEKIIHKSVSTNTSYADLGFNTLILDYLSASIWSAWDNKLYNLKTKHISFKKYGELDSFSTRKKLVKEKLYFSGIELHLDKMELAIKMNGKVGKNAKFITLKMLHNPKHADYEMWALKGGVDSVKVVKVVRRLVRSQYKYYVQLTIEGEKPQKGRTLGKGNVGIDLGPTTVAVSGENVVSIDKLASKCDNIQEEITRLSTKIDRSRRANNPQNFNEDGTIKRGIKLVWNDSKRYKELRRELAELRRKQAAIRKQQHIDRANALLKEGDTFIVENNQISGWATRAKETKVNEKTGKIQKKKRFGKSIANHAPSMFVSILENKVKSLGGEVVKVDTKNAASQYDFTDGSFTKHELKERNVTLSNGDTHQRDMLAAFNLQHLKYDEKDTKQYDTEAMTADYERFCQLEQEEIQRYKNKEKKDDKGTIGAEKL

SEQ ID NO: 2853 - protein, 527 aa, unidentified
  REGION 1..527: note = Category: MG91 effectors
  REGION 1..527: note = Description: MG91-44 effector
  source 1..527: note = uncultivated organism sequence
MNEVFVLELPLQVEKYQEDILDKRFEQLRQLYNYVQGKLLRQYRYFEQTKEFQACKTIKEKRDFFRNHPFHFNGIYGNNNELFNITFDEYGVNGFVSKMAKKQVGANMTYADLGITTTLLDRLSLAIWASWEKKLYDYHTKRISFKKHGELNIFGSRKKTNGSGKKMFSGMELNLERMEVSIKLNGKVGKKAKYITLPILHNPKHVDYEMMALKGGFDSVKVITVVRRLVRGRYKYYLQMSIEGEKPKKDRTLGKGNVGIDIGPTTVAVSGENIASIDKLASKCDSIEVEKARLGRKIDRSRRANNPQNFNEDGTIKRGVRLVWNDSKRYKVLRREMTELQRRQAAIRKQQHIDRANELLKEGDTFIVENNQISGWTRKAKETKVNEKTGKIQKKKRFGKSVANHAPSMFVTILENKVKSLGGQVVKVDTKNAASQYDFTNDSFEKHELNERSVTLSNGDTHQRDMLAAFNLQHLKYDAQEKKQYDREAMTQHYDRFCKLERAEIMRYKNKEKRDDRSTIGAGELNT

SEQ ID NO: 2854 - protein, 615 aa, unidentified
  REGION 1..615: note = Category: MG91 effectors
  REGION 1..615: note = Description: MG91-45 effector
  source 1..615: note = uncultivated organism sequence
MAKEVFVLTLPLKVEKWQADILDKRYELLRQTYNMVQQRLLRQYIYFSQQKAYKACETFVQRRDFFASHPFHFKGIKGKNGESSDIKFPYTYESRSSNTGKRPSGGISDYVSKLWSHRVGQDKTLADFGINSYLLEELGLHIMKAWEKRLYDPQSSHVSFKKYGDVNSFGSRYKKDKKSNRITFPGFAIDLVKGYIVYNTEGKRVKTNPFVLPIDFSREKKEYALESLKGGVDSIRKLLIVRRCIRGRNKYYLQLSIKGEKPQKGRTLGKGNVGIDIGPSTIAVSSLQGVHFDKLANKCDNIEHELHLLNRKIDRSRRANNPQNYNEDGTVKRGVRLVWKKDKDAKRYANLKQIRKELHRRQAAIRKQQHLEMANALLSQGDTFIVENNPVDAWVRRAKETTKTKTGKNRCKKRFGKSVANHAPATFVSILKNKVLSLGGQFHEVDIHNAATQFDFTSQQFTKHELGERSVKLSNGNTHQRDMLSAFNLQHLRAQSEENKDYDIEQMKADYPIFCKLETAEKERIKGERSVERDVLFYIGASTQDMRQQPQKSTVVNRHNGGVGRKHCNTRLGSRKKENAEITGSGLVRESIERVSQVPDEYHHFGIQSVILDGL

SEQ ID NO: 2855 - protein, 605 aa, unidentified
  REGION 1..605: note = Category: MG91 effectors
  REGION 1..605: note = Description: MG91-46 effector
  source 1..605: note = uncultivated organism sequence
MIEEFVLTLPLKVESWQADILNNRYEHLRRIYNMVQRKLLRHYIYLSQQNEYRQCKDNDEKRTFWENHPITFKDFCDKNGNPAIVKFPYTYSHRSKDSGKKASNGISDFVPKFKNRNIGGGLTYGSLGINASILENLGLRIEQAWKKRLYDPKSKHISFKEEGDLNTLGCREKNGFSGFVLDLQKMTLSFNTNGRQGKSAKFIHFPINAGKELTEYEMYALKGGIGSIRKIVVSREYVRGRYKYYVQLTIKGEKPQKNRTLGKGTVGIDVGPSTVAVSSLHGVSLDKLADKCDNIEHDLWRINRKMDRSKHETNPDFFNEDKTYKKPEKGERRKWTFSNRYKRLKLERRELYRKQAAISKQQHIDMANALLSQGDEFIVENNPIDSWAKRAKETKRGKNGKIRCKRRFGKSVAHHAPAMFVSILQNKVRSLGGTFHKVEIKNAATQFDFTNGEFTKHELNERTVTLSNGRTHQRDMLSAFNLQHLRPDSEETKDYNIEQMEADYPVFCKLEEKGIAQFKEKRQQERDVAYFTGVSHKTLKFSSANRHNGGVGRKNCNHHAGSKRNVAETGNKSSSKEYCESMETVSLVPNEYHHSNHQHLRLDGL

SEQ ID NO: 2856 - protein, 533 aa, unidentified
  REGION 1..533: note = Category: MG91 effectors
  REGION 1..533: note = Description: MG91-47 effector
  source 1..533: note = uncultivated organism sequence
MNEVFVLELPLRVEKYQADILNKRYEQLRQLYNYVQGKLLRQYRYFEQMREFQDCKTFKAKREFIKAHPFQISGISGSNKQPLDITFDEYGIRGFVEKLAQKSAGPNVTYADLGFTTYILDHLSVSIWSAWDKMLYDYHAKRVSFKKYGELDSFSSRRKIVGGKVYFSGMELHLDTMELSVKLNGKQGANAKFITLPILHNPKHADYEMWALKGGLVSVKVVKVIRRMVRSQYKYYVQLTIEGEKPQKGRTLGKGNVGIDLGPTTVAVSGDNIVSIDKLASKCDNIQKEITRLARKIDRSRRANNPQNFNEDGTVKRGIKLVWNDSKRYKELRREMAELQRRQAAIRKQQHIDRANELLKEGDTFIVENNQISGWTRKAKETKVNEKTGKIQKKKRFGKSVANHAPAMFVNILENKVKSLGGEVVKVDTQNAASQYDFTNDSFEKHELKERSITLSNGDTHQRDMLAAFNLQHLKYDDKEKKQYDTEAMKEHYERFCELEQEEIQRYKDKEKKDDRSTIGAEKLHMNDGTVKK

SEQ ID NO: 2857 - protein, 650 aa, unidentified
  REGION 1..650: note = Category: MG91 effectors
  REGION 1..650: note = Description: MG91-48 effector
  source 1..650: note = uncultivated organism sequence
MSEKSLIVYSASLKDKKISNILDSNSIPLVYLHNIKIDILNKITNNVLKYFNTNIKGIIKSNNIDEYTKKFNIFNKKIISHPDFDKFRLNIKNNIKNNILSLPTLIKTPEFFIHEKRIDGNKQLVNTGRTITKQLLINMCGGDNAIDYTNYLNKPIKKFSIIKYYNYLFISKKEVNLTGILEMQLNSNEEENLSNFKIKCKEYFSKIDVENDEFIRVILNVTYVNDKRDKIITYITTESKNQSNYYNFVNNLKFAMFIDNETSRFTNNQISKTKYSKLHEHIDYYNYTLRIEKTAINKDTGIRKDPIPYKYEKWDNEQYKYNSIKITKGIMFYKLDDTYNHKTRNKYNIVFKLNKFFKNKLTYDSYKNLLKNNQIFDNKANINDIEFEIELIVPKDINIQTFRLVRLIKSCDIWDAHFTFEDDNKYYTNSNNNVYFDRNINNLIGIDDNSELYNIDMPQHNKKSKKLYFKIKNIQKRLSKNNNEINNKILKKYNKKRTNYKKTILQQECKKIVEKGGNIYLEKNNISNMTKSAKGNSLNNGKNVRAKSKLNRKLLDSNFKFIEEQLEKNTKRYGKKFVPINTNHSPSQHCPNCNTKYEKTNNYTYRTCSSCNLSFDRDIAANINNIKENKGHTSQQIQNHINKYKNKKIK

SEQ ID NO: 2858 - protein, 535 aa, unidentified
  REGION 1..535: note = Category: MG91 effectors
  REGION 1..535: note = Description: MG91-49 effector
  source 1..535: note = uncultivated organism sequence
MATENFVLELPLKVEKWQADILNKRYEYLRQIYNYVQRKLIRQYRYFEQMDEFRQCTTYKEKREFFKSHPFYFKDIVGRNGEPFAIKFPYSMSASSGSKMDGFSGYIAKLGKLPAGANKSYSDLGINSFMLERLASNMWAAWNKYLYDRDSKRVSFKKYRDLNTFGSRKANNTTFIGMEIHLDSMEVIIKTNGKLGKYAKYITLPIDYKHSMTEYEMFALKGGFDSIKILNVVRKEIRGREKYYVQLTIEGEKPQKGRMLGKGNVGIDLGPSTIAVSSRQKVSIDKLANKCDDIQRDLYVVSRKMDRSRKANNPQNFNEDGTIKPISRKNGERRYWNDSKRYERLRSERKELLRKQAAIRKLQHIETANALLELGDTFIVENNPVSGWTRKSKETKLNKKGRIQSKKRFGKSVANHAPAMFSTILENKVKSLGGQFKKVDVKNAASRFDFTNGEFTEHKLNERVITLSNGDKHQRDLMAAFNLQHLNLDGDLSKDYDVEMMQRDYPDFCRLEREEMDMYLQGIKKNERTTIGAFK

SEQ ID NO: 2859 - protein, 528 aa, unidentified
  REGION 1..528: note = Category: MG91 effectors
  REGION 1..528: note = Description: MG91-50 effector
  source 1..528: note = uncultivated organism sequence
MNEVFVLELPLQVENYQADILNKRYEQLRQLYNYVQGKLLRQYRYFEQTKEFQECKTFKAKREFIKAHPFQIKGVLGRNKKLLDIFFDEYGILGLVAKLGQKPIGSRKTYTDMGISSTILANLSDNIWSSWNKKLYDYHANRVSFKKFGELNTFGSGKIIQKKDNEVKEYFPGMVLHLDKMEIDIKTNGALGKKATFITLPILHNPKHADYEMMALAGGSRSIKVLNVVRRLVRGQYKYYLQMTIEGEKPQKGRTLGNGNVGIDLGPTTVAVSGENVVSIDKLASKCDNIQEEITRLSRKIDRSRRANNPQNFNEDGTIKRGIKLVWNDSKRYKELRRELAELRRKQAAIRKQQHIDRANALLKEGDTFIVENNQISGWTTRAKETKVNEKTGKIQKKKRFGKSVANHAPSMFVSILENKVKSLGGEVVKVDTKNAASQYDFTNGSFTKHELKERNVTLSNGDTHQRDMLAAFNLQHLKYDEKDTKQYDTEAMTADYERFCQLEQEEIQRYKNKEKKDDRSTIGAEKL

SEQ ID NO: 2860 - protein, 490 aa, unidentified
  REGION 1..490: note = Category: MG91 effectors
  REGION 1..490: note = Description: MG91-51 effector
  source 1..490: note = uncultivated organism sequence
MARENENSGCFVVTFPLKTEKWQEDRIDKILTLLTVRYREKQKILLDRYIHLSHSPEFKEAKNAGLKALRDFMNEHKFTKYDVEKVFSDSSLSKSVTTDIMLTHGINSSIMQELSHRAWSAWEKKLYGQGKFIKLDNEVNIFKSRLKGSTITGFEYSFTDMTLSMNATKPKKHTMFTIPFVVNRKSEYEAYAMDCEVRNIAIMRQQIRGKNKYYVQFSFAGTPYNKGRKIGTGIVGIDPGPSKIAIVSDSEIRITTLAPSVNRDERAICRMQRKLDRSRRATNPDNYNDDGTIKRGIKLTFEKSNSYKRTQTKLADTQRKLAAKRKIDHNILANEIIAMGNEFHVENNSFKSMQARSKETKKNDKGKNMSKKRFGKSLANRAPSELLTILKNKVNQYADGDYVDIPSGVACTQFDFTNGEFTKHELKERTITTSDGVVHDRDALAAFNMRFVHKKKIEGKKKIEKDKENFDILAMTEAYRQFCSLEKNIK

SEQ ID NO: 2861 - protein, 518 aa, unidentified
  REGION 1..518: note = Category: MG91 effectors
  REGION 1..518: note = Description: MG91-52 effector
  source 1..518: note = uncultivated organism sequence
MDKEVFVIEFPLNVEKWQADILNKRYEHLRTLYNYVQGKLLRQYIYFAQMGEYKNCKTPKERREFFKTHAFHIKGISGRNNITFTEYGIHSLVTKLAQHRIGADCTYRDKGINSMILDHMAAYIWSSWNKKLYDINARRISFKNFGEINTFGVRKINGARFCGLNLHLDIMTLDIKINGKNGQQAKFISLPVRYNLKHAGYEMNALAGGFDSIKVLTVVRRMVRGRYKYYLQMTIEGVKPQKGRHLGNGRVGIDIGPTTIAVSSNSTVSIDKLAAKCDNIEQDIQRIGRKIDRSRRAMNPDNFNADGTVKRGVRLTWVKSERYKALCQEKAELQRKQAAIRKAQHIERVNTLISEGDTFIIESNPIKGWTARAKETKVSEKTGRFQKKKRWGKSVANHAPSMFVTILENKVKSLGGTVIKADVKNAASQYDFTDGTFTKHELDERGVTLSNGDTHQRDMLSAFNLQHLIYDTKELKQYDQQQMEIHYPRFCELEQQEIEKYKQRIKTDDRSTIAASRL

SEQ ID NO: 2862 - protein, 528 aa, unidentified
  REGION 1..528: note = Category: MG91 effectors
  REGION 1..528: note = Description: MG91-53 effector
  source 1..528: note = uncultivated organism sequence
MKEVFVLELPLRVEKYQADILNKRYELLRQLYNYVQGKLLRQYRYFEQMKDYQICKTFKDKREFIKAHSFHINGVLGRNKELLDISFDEYGIMGLVTKLGQKLIGSGKTYTDMGISSTILANLSDNIWSSWNKKLYDYHADRITFKKYGSLNTFGSGKIVQKKDNEVKEYFPGMVLHLERMEIEIKTNGGLGKKATFITLPILHNPKHADYEMMALAGGSSSIKVLTIVRRLVRGQYKYYLQMSIEGEKPQKGRMLGKGNVGIDLGPTTVAVSGENIACIDKLASKCDNIQAEITKLARKIDRSRRANNPQNYNEDGTIKRGIKLVWYDSKRYKELRRELAELRRKQAAIRKQQHIDRANALLKEGDTFIVENNQISGWTTRAKETKVNEKTGKIQKKKRFGKSVANHAPSMFVTILENKVKSLGGQVVKVDTQNAASQYDFTNDSFTKHELKERNVTLSNGDTHQRDMLAAFNLQHLKYDEKEKKQYDKEAMKAHYEHFCELEQEEIQRYKNKEKKDDRSTIGAEKL

SEQ ID NO: 2863 - protein, 524 aa, unidentified
  REGION 1..524: note = Category: MG91 effectors
  REGION 1..524: note = Description: MG91-54 effector
  source 1..524: note = uncultivated organism sequence
MEEVFVLELPLQVEKYQADILNKRYEQLRQLYNYVQGKLLRQYRYFEQMSEFQGCKTIREKRDFFRSHPFHIKGKLAGNKELPEITFDEYGINGFVEKLAQKSAGSNTTYADLGFTTYILDHLSTSIWAAWEKMLYDYRAKRISFKKYGELDSFSSRRKVVGGKVYFSGMELHLDTMELAIKLNAKQGKNAKFVTLRILHNPKHADYEMWALKGGLESIKVVKVVRRLVRGQYKYYLQMSIEGEKPKKGRTLGKGNVGIDLGPTTVAVSGENIASIDKLASKCDNIQEEITRLARKIDRSRRANNPQNFNEDGTIKRGVRLVWNDSKRYKALRREMAELQRRQAAIRKQQHIERANELLKEGDTFIVENNQISGWTRKAKETKVNEKTGKIQKKKRFGKSVANHAPSMFVTILENKVKSLGGEVIKVDTQNAASQYDFTNNSFEKHELKERSVTLSNGDTHQRDMLAAFNLQHLKYDKQEKKQYDTEAMAQHYERFCELEQEEIMRYKNKEKKDDRSTIGAGEL

SEQ ID NO: 2864 - protein, 609 aa, unidentified
  REGION 1..609: note = Category: MG91 effectors
  REGION 1..609: note = Description: MG91-55 effector
  source 1..609: note = uncultivated organism sequence
MAKEEFVLTLPLKVEKWQADILDKRYELLRQVYNMVQQKLVRQYIYFSQQRVYKDCKNFEQRRKFFEDHPFHIKGVKGRNGELCDIKFPYTYKSRGGSSGKRSPNGISDFVSKLWSHKIGQDKTLADFGINSSIMEELGLHIMKAWEYRLYKPKSKRVSFKEYGEINSFGSRKKNGIFGGFTLDLEKGYITYKYRKRNEKGDRTDFIQLPIDFSREKKGYPKEALKGGIDSLKKILIVRRCIRGGNKYYLQLTISGEKPQKGRTLGRGNVGIDIGPSTIATSSLKGVHFDKLADRCDNIEHELYLINRKLDRSRKANNPQNYNEDGTIKRGVRLVWKKDKDVKRYAALKRQRKELYRRQSEIRKLQHLEMANAMLSQGDTFIVENNPIDAWVRRAKETTKTKTGKNRCKKRYGKSVANHAPSMFVSILKNKVLSLGGNFYEIDLRNAATQFDFTNGEFTKHEVGERSITLSNGQTHQRDMLSAFNLQHIVLQSKELKEYDIEQMEADYPIFCKLEAAEQERFKEARRKERDALYYVGASKKQMRRQPQEESVANCHNGGVGRKHCNTSLGNENAEITGSGLARESIERISQVPDECHHFGCDPIVLDGL

SEQ ID NO: 2865 - protein, 536 aa, unidentified
  REGION 1..536: note = Category: MG91 effectors
  REGION 1..536: note = Description: MG91-56 effector
  source 1..536: note = uncultivated organism sequence
MEKENFVVELPLKVEKWQADLLDKRYELLRGIYNYVQSKLLRQFRYFEQMSEWKKCKTKKDKQKFMETHPFTIRGFKKPIILCKMKSKDNKADVYGVTNFVEQIVKNKVSADKTYKDFGINTTNINALAQHIWSAWEKKLYGKPKIIKDKKTGESIKIPNKIHFKKSGDINTISLREKNGKFTGLDVDLEHMVLYFNTNGKIGAKSKKITLPIVFSNPTEYEMYSFKNGIESVRVVTIVRKLIRGKYKFYVQFTIEGEKPQKGRTLGKGEVGVDVGPSTIAVSSLSGVQINTLAEKCDNIEHACKLLERKMDRSKRATNPQNYNDDGTIKKIKSKKIKWNYSNRYIKTRNKKCELHRKQAAIRKLQHNIDCNELLKLGKIFIVENNPISAWQRKATETKINKKGKYQSKKRFGKSIANHAPAMFITILENKVKSLGGQLIRVDIRNAASRFDFTNSDFVEHKLNERKITLSNGNTHQRDLLAAFNLQHLRYNNENLKTYNIKDMERDYPIFCKLETIEINKFINSQKKSHKSTIGY

SEQ ID NO: 2866 - protein, 609 aa, unidentified
  REGION 1..609: note = Category: MG91 effectors
  REGION 1..609: note = Description: MG91-57 effector
  source 1..609: note = uncultivated organism sequence
MAKENFVLTLPLKVEKWQADILDKRYELLRQVYNMVRQKLLRQYIYFSQQKAYKECGKDTKKKGKFFAEHPFFIKIDGKPCEVKFPTWKKSNQTASNSIAKYVSKLSSYKLGQDKTLSDFGINSYILEELGARIMKAWEDRLYKFKAKHISKREYGDVNSFSTRIKKSDNKISYPGFTINLEEGYITYNTNGRRGGFANLIKLPIDFSREKKGYAVEALKGGLESIREISVVRKYIRGKNKYYLQLTIDGEKPQKGRTLGRGNVGIDIGPSTIATSSLMGVHFDKLADKCDDIEHELYLVNRKLDRSRRATNPQNYNTDGTFKTIKNRERRVWNYSNRYNKLKLVRKELFRRQAEIRKQQHLAMANALLSQGDTFIVENNPIDAWVRRAKETSKNKKGNYRCKKRYGKSVAHHAPAMFVSILENKVKSLGGELHKVDVGYAATQFDFTNGEFTKHAVNERSITLSNGHTHQRDMLSAFNLQHARLKTDSRNIEKTVDNYDIEQMNADYPIFCRLETAEQERFKAIRHYERDALFFVGVSNKHLRCQPQEETVANRHNGGVGRKDCNISLGSENAEITGNGLIRESIARVSQVPDECHPFAGKPIVLDGL

SEQ ID NO: 2867 - protein, 484 aa, unidentified
  REGION 1..484: note = Category: MG91 effectors
  REGION 1..484: note = Description: MG91-58 effector
  source 1..484: note = uncultivated organism sequence
MAHKENQKAFVITFPLRTEKWQEDRIDKMMRMLTTFYNDRQRKLVRRYIYLSHSKAYQEAKGKGVVAFKNYMKENGFSQYGLDAFFKADTKGALYQCGLNSMFLQYLSQCAWSAWDKKLFGKGDFVKTDKVVNIFCSRNMKGRFCGFDYDLSTFTIRIKSTCTKEIICTIPFVVNKNSEYELYALSQKICRIGIVRKLIRSKYKYYVQFTFDGVPYNKGRNIGTGIVGIDPGPSKIAIVSDKKVEIAKLAPNIIEDERKTARLKRKLDRSRRATNPHMYKEDGTIIKGQRQTCFSKAYNKTRKQLAEAQRKLAAKRKIAHNELANTLLEYGDTFKVEANSYKSMQARTKATSMTKSGRIRSKKRYGKSIKNRAPSEFLVILKNKLLYYPKGKYYDVPSSYACTQFDFTNESFTEHKISERRIVTSDGIQHNRDTLAAFNIKNAIVNDASTKKKKVTKSKEFFDIVKMKASYNEFCVMESYLLSV

SEQ ID NO: 2868 - protein, 484 aa, unidentified
  REGION 1..484: note = Category: MG91 effectors
  REGION 1..484: note = Description: MG91-59 effector
  source 1..484: note = uncultivated organism sequence
MAHKENQKAFVVTFPLRTEKWQEDRIDKMMRMLTTFYNDRQRKLVRRYIYLSHSKAYKEAKSKGVVAFKNYMKENGFSQYGLDAFFKADTRGALYQCGLNSMFLQYLSQCAWSAWDKKLFRKGDFVKTDKVVNIFCSRNKKERFCGFNYDLGTFTISIKSTCTKKIICTIPFVVNKKSDYELFALSQRICRIGIVRKLIRGKYKYYVQFTFDGVPYNKGRNIGTGIVGIDPGPSKIAIVGDNKVEIAKLAPGIEEDERKTARLKRKLDRSRRATNPHMYKEDGTNIIGQRQIFFSKSYNETRKQLAEAQRKLAAKRKIAHNELANTLLEYGDTFKVEANSYKSMQARTKATSMTKSGRIRSKKRYGKSIKNRAPSEFLVILKNKLLHYPNGKYYAVPASYACTQFDFTNESFTEHKISERKIVTSDGVQHNRDTLAAFNIKNAIVNETSTKKKKITKSNEFFDIVRMKASYNEFCLMERYLLSI

SEQ ID NO: 2869 - protein, 621 aa, unidentified
  REGION 1..621: note = Category: MG91 effectors
  REGION 1..621: note = Description: MG91-60 effector
  source 1..621: note = uncultivated organism sequence
MRLFDYICIILLMIQSMIEEFVLTLPLKVEPWQADILNNRYEHLRRIYNMVQRKLLRHYIYLSQQNKYRQCKDNDEKRTFWETHHVTIKDFCDKKGNPAILRFPHTYYTRSKASGKRTSHGIPDLLPKLKNRNIGSGLTYASLGINAAILENLGLRIEQAWKKRLYDHKSKHISFKEEGDLNTFGCREKDGFSGFVLDLQKMKLSFNTNGRQGKSAKFIHFPINAGKELTEYEMYALKGGIGSVRKIIVAREYVRGRYKYYVQLTIKGEKPQKNRTLGKGTVGIDVGPSTVAVSSLHGVSLDKLADKCDNIEHDLWRINRKMDRSKRDTNPDFFNEDKTYKKPEKGERRKWTFSNRYKRLKLKRRELYRKQAAIRKRQHIEMANALLSQGDEFIVENNPIDSWTKRAKETKRGKNGKIRCKRRFGKSVAHHAPAMFVSILQNKVRSLGGTFHKVEIKNAATQFDFTNGEFTKHELNERTVTLSNGRTHQRDMLSAFNLQHLRTNSEELKDYDIEQMEADYPVFCKLEEKGIAQFKEKRQQERDVAYFTGVSHKTLKFSSANRHNGGVGRGNCNYHAGSKRNVAKTGNKSSSKENCESMETVSLVPNEYHHSNHQPFRLDGL

SEQ ID NO: 2870 - protein, 517 aa, unidentified
  REGION 1..517: note = Category: MG91 effectors
  REGION 1..517: note = Description: MG91-61 effector
  source 1..517: note = uncultivated organism sequence
MKKKSTEETFIMELPLKVEKFQADELNKRFELMRRIYNSAQNKLERQHEYLLSFKEYKECNTKKAKGEFINNHPFSFKGVLNKNGEPMNITFTEFGLKSYLADFAKKKVDSQYTYSDFGINTSMLMSMGMAAWSAWKKVIYDPKAKDIHYKKYGDLKSIAVDWEPKHQAGMYLDVCKGVLKLNINGRRGQYAKYLTFPIKFGRKERQLWYEGDALKGGEDSFKGLAIVRRKYNGQFRYFLQLTIRNCTPTKDRTLGKGRVAIDLGIYKIAVYTGDQVYFFPLAPNCREIDEKIAVLQRQMERSKRISNPQFYNADGTYIKAKKHEHRKWNFTKEYLKLRAMKAELQRKQAAIRKQDHIDLANHLLSFGNEFVIEDNDVKAWAERKKEEKKREKDGKNLSKKGLGKPIGSHAPAAFVTLLANKVKALRGTFTKVAVDNGATDYDFINDTFTPHELKERYITLCNGVTHQRDSLAAFNLYYIDTNPEKSRCYDRKAMKRGYKKFQELEKEALKQWKKPV

SEQ ID NO: 2871 - protein, 528 aa, unidentified
  REGION 1..528: note = Category: MG91 effectors
  REGION 1..528: note = Description: MG91-62 effector
  source 1..528: note = uncultivated organism sequence
MNEVFVLELPLQIEKYQADALNKRYEQLRQLYNYVQGKLLRQHRYFEQMKEYQACKKIKEKRIFFRSHPFQINETLKGNKIPFKVSFDEYSIKGYIEKLVQKSVGPNMTYADLGFTTNILDHLGASVWAAWDKKLYDLKAKRISFKKYGELDSFSSRRKVVRGVVYFSGMELHLDSMELAIKMNGKVGKDAKFITLKMLHNPKHADYELWALKGGVDSVKVVKVVRRLVRSQYKYYVQLTIEGEKPQKGRTLGKGNVGIDLGPTTVAVSGVNVVSIDKLASKCDNIQEEITQLSRKIDRSRRANNPQNFNEDGTIKRGIKLVWSDSKRYKELRRELAELRRKQAVIRKQQHIERANALLKEGDTFIVENNPISSWTTRAKETKVNEKTGKIQKKKRFGKSVANHAPSMFVSILENKVKSLGGRFERVSTQNAASQYDFTTDTFKTGEEKHKLNERAITLSNGDTHQRDMLAAFNLQHLKYDEKDAKQYDTEAMTADYERFCQLEQEEILRYKNKVKKDDRSTIGAEKL

SEQ ID NO: 2872 - protein, 322 aa, unidentified
  REGION 1..322: note = Category: MG91 effectors
  REGION 1..322: note = Description: MG91-63 effector
  source 1..322: note = uncultivated organism sequence
MKEVFVLELPLQVEKYQADILNKRYEQLRQLYNYVQGKLLRQYRYFEQMDEFQACKTFKEKKDFFRIHPFHIDGILNNNKELLDITFDEYGVKGFVEKLVQKPVGPNMTYADLGFTTYILDHLSSSIWSAWDRMLYDYKAKRISFKRYGELDSFSSRRKVVRGKIYFSGLELHLDSMELSIKLNGKSGKDSKFITLPILHNPKHANYELWALKGGLESIKVVKIIRRMVRSCYKYYVQLTIEGEKPQKGRIIGKGRVGIDLGPTTVAISGENVVSIDKLASQCDNIQEEITRLSRKIDRSRRANNPDNYNEDGTIKRGVKLV

SEQ ID NO: 2873 - protein, 610 aa, unidentified
  REGION 1..610: note = Category: MG91 effectors
  REGION 1..610: note = Description: MG91-64 effector
  source 1..610: note = uncultivated organism sequence
MIIFTKISEFIISYWMPVKKDDKPRFVLEMPLKVEQWQADILNVRYELMRRMYNRARRILLSHFYYMVQKDEYQECASNKRERAVYIKNHPIFIKGVTDKKGNVKPITFTEFGIKDVVLSFVTRDVGSGKTYKDFGINTSFADCVASNLWAAWEKFMYDGKCKGVAFKRRFNTISIGKNNGCFGGLKLSLESMTLSVNVNGKQKGNAKFITLPVCGDNQSEYEMQALQGGLESICVVSIARKLIRGKYKYYLQLTIKGHAPNKGRALGCGTVGVDVGPSTVAFVSQSDVQINRLASECDDIEDVIGKIQQKMDRSRRATNPQNFNEDGTLKRISRKNGERRIWNDSRRYRLLCKQKAELQRKQAAVRKMSHILKINQILSLGDTFFVENNPISQWTKRAKETKVSEKTGRYCSKKRAGKSVANHAPAMFVTLLKNKVQSLGGRCREVDIKNAASRFDFTDGQFKVHGLDERIVTLSNNKTHQRDILAAFNLQHIICVDDDKKLKKYDIARMYADYPAFCDMERAEIEKFVSGEKETDRHTIGAIEELKVVLSSHADDPSVLYSVDKLSANSEGNKTGKKAGSALVHESNDRVLEVLNESTLFTIKDLHVT

SEQ ID NO: 2874 - protein, 597 aa, unidentified
  REGION 1..597: note = Category: MG91 effectors
  REGION 1..597: note = Description: MG91-65 effector
  source 1..597: note = uncultivated organism sequence
MKAIDRSFTPAVGSSPGDGHPEMKAIDRVPPVCRNSPTGDGHPEMKAIDRLATRAEKLMSGDGHPEMKAIKTMNEVFVLELPLQVEKYQEDILDKRYEQLRQLYNYVQGKLLRQYRYFEQMKEFQACKTFKEKRDFFRAHPFHINGVYGNNNELFDITFDEYGVNGFVSKMAKKQVGANMTYADLGITTTLLDRLSLAIWASWEKMLYDYHARRISFKKHGELNIFGSRKKTNGSGKKVFSGMELNLERMEVSIKLNGKVGKKAKYIILPILHNPKHVDYEMMALKGGYDSVKVITVVRRLIRGRYKYYLQMSIEGEKPKKGRTLGKGNVGIDIGPTTVAVSGENIAYIDKLASKCDSIEAEKAKLGRKIDRSRRANNPQNFNENGTIKRGVRLVWTDSKRYKALRREMTELQRRQAAIRKQQHIDRANELLKEGDTFIVENNQVSGWTRKAKETKVNEKTGKILKKKRYGKSVANHAPSMFVTILENKVKSLGGQVVKVDIQNSASQYDFTNDTFKKHELKERSVTLSNGNTHQRDMLAAFNLQHLKYDAPEKKQYNREKMALHYDHFCKLEQEEILRYKNKEKKDDRSTIGAEKL

SEQ ID NO: 2875 - protein, 524 aa, unidentified
  REGION 1..524: note = Category: MG91 effectors
  REGION 1..524: note = Description: MG91-66 effector
  source 1..524: note = uncultivated organism sequence
MNEVFVLELPLLVERYQADILNKRYEQLRQLYNYVQGKLLRQYRYFEQMKEYKACEKIKEKRDFFRAHPFHINGVLNGNKKQLDITFDKNGINGFVEKLAQKSAGPTITYADLGFTTYILDHLSASIWAAWEKKLYDFKAKRISFKKYGELDSFSSRRKVVGGKVYFSGMELHLDTMKLSIKMNGKQGDNAKFITLKMLHNPKHADYEMWALKGGVDSVKVVKVVRRLVRSQYKYYVQLTIEGEKPQKGRKLGNGNVGIDLGPTTVAVSGENVVSIDKLASKCDNIQEEITRLSRKIDRSRRANNPQNFNEDGTIKRGIKLVWNDSKRYKELRRELAELRRKQAAIRKQQHIERANALLKEGDTFIVENNQISGWTTRAKETKVNEKTGKIQKKKRFGKSVANHAPSMFVSILENKVKSLGGEVVKVDTKNAASQYDFTDNSFTKHELKERNVTLSNGDTHQRDMLAAFNLQHLKYDEAEAKQYDTEAMAANYERFCQLEQEEIQRYKNKEKKDDRSTIGAEEL

SEQ ID NO: 2876 - protein, 605 aa, unidentified
  REGION 1..605: note = Category: MG91 effectors
  REGION 1..605: note = Description: MG91-67 effector
  source 1..605: note = uncultivated organism sequence
MIEEFVLTLPLKVESWQADILNKRYEHLRRIYNTVQRRLLRNYIYLSQQKVYRQLKDNDEKRAFWEHHPITFKDFCDRNGNPAIVKFPYTYSRRSKNSGKKASNGISDFVPKFKNRNIGSGLTYGSLGINASILEELGLRIQQAWEKRIYDSKSKRISFKEEGDLNTFGCRNKKGFSGFVLDLTHMMLSLNINGRQHQLAQYIHIPINPNKEFTEYEMYALKDGLSSVRKIIVSRVYIRGRYKYYVQLTIKGEKPQKNRTLGKGSVGIDVGPSTVAISSLKGVTLDKLADKCDDIEHDLWRINRKMDRSKRATNPDFFNKDGTYIKRKKGERRKWHFSNRYNRLKLERLELYRKQATIRKQQHIDIANALLSQGDDFIVENNPIDSWAKRAKETKRGKNGKIRCKRRFGKSVAHHAPAMFVSILQNKVHSLGGSFRKVEIKNAATQFDFTNGEFTKHELNERTVTLSDGRTHQRDMLSAFNLQHLRPESEEIKDYDIEQMEVDYPIFCKLEEQGIAIFKEKRPQDRDVAYFVGTSHKTLKISSANRHNGGVGRKNCNHHAGKRKNVAKAVTKSSSKKNCESLESVSIVPNEYHHSDNQHLRLDRL

SEQ ID NO: 2877 - protein, 614 aa, unidentified
  REGION 1..614: note = Category: MG91 effectors
  REGION 1..614: note = Description: MG91-68 effector
  source 1..614: note = uncultivated organism sequence
MPKEEFVLTLPLRVEKRHADILDKRYELLRQMYNMVQQKLVRQYIYFSQQKAYKACENFEQKRKFFNAHPFHFKGIKRKNGELSDIKFPYTYESRSSWSGKRPSGGISDYVSKLWSHKLGADKRLVDFGLNGSIMEELGLHVMKAWYDRLYKFKTKRVSFKDYGEINSFGCRLNKGNFAGFTINLEEGFITFNTNGRQGRFADIITLPIDFSREKRGYAAEALKDGVDSLRKLVIVRRCIRGRNKYYLQLTISGEKPEKGRTLGKGNVGIDIGPSTIATSSLQGVHFDKLADKCDNIEHELYIVNRKMARSRYENNRKYYNEDRTFKPREKGEIRRWKESNRFKQLKLVRRELYRKQAEIRKQQHLEMANAMLSQGDTFIVENNPIDAWVRRAKETTKTKTGKYRSKKRYGKSVANHAPAMFVTILENKVKSLGGEFHRIDPGYAATQFDFTNGVFTKHEVSERSITLSNGRTHQRDMLSAFNLQHARLDGEKEKSRDKEKKVESYDIAQMQADYPIFCRLETVEQERFKDARRNERDALYFVGAFAKELRHEPQEETVANRHNGGVGRKHCNTLCTENAKITGGLVRESIERVSEAPEECHHVGNQPIILDGL

SEQ ID NO: 2878 - protein, 510 aa, unidentified
  REGION 1..510: note = Category: MG91 effectors
  REGION 1..510: note = Description: MG91-69 effector
  source 1..510: note = uncultivated organism sequence
MFVVELPLKVEKWQSDVLNKRYELIAKIYNYAQKKLLRQYIYLTQMDEYKKCKTKKEKSNFFKNHPFYFKDITSKITFSEYDVTAFVEKIIKKNVSSDKTYKDFGINTSITECLGKHIWSAWEKKIYDKGKKISFKNKGELNTISIRKKSEYFGGLDVDIEHMILSFNINGKIKAKAKKIILPINVKNLTEYEMYALQGGYDSINVVTIIRKTIRGKYKYYVQFTIEGEKPQKGRTLGKGNVGIDIGPSTVAISSLNGVTIDTLAEKCDNIESKISDIGRKMDRSRRATNPQNFTEDGQIKRIDRKKGEKRVWKCSKRYVKLRNKKHELLRKQAVIRKLQHNIKANEILSLGDTFIVEDNPTSAWAKRAKGVRKNKNGKIQTNKRFGKSIANHAPSMFVTILQNKVDSLKGKFVKVDCKNAASRFDFTNGDFTGHNLDERKITLSNGNTHQRDMLAAFNLQHIDLTNDDLKKYNVDEMVEDYPIFCKLEKEEIGKFINGQKKSRSCTVGY

SEQ ID NO: 2879 - protein, 413 aa, unidentified
  REGION 1..413: note = Category: MG91 effectors
  REGION 1..413: note = Description: MG91-70 effector
  source 1..413: note = uncultivated organism sequence
MKENGFSQYGLDAFFKADTKGALYQCGLNSMFLQYLSQCAWSAWDKKLFGKGDFVKTDKVVNIFCSRNMKGRFCGFDYDLSTFTIRIKSTCTKKIICTIPFVVNKNSEYELYALSQKICRIGMVRKLIRSKYKYYVQFTFDGVPYNKGRNIGTGIVGIDPGPSKIAIVSDEKVEIAKLAPGIEEDERKTARLRRKLDRSRRATNPHMYKEDGTIIKGQRQTYFSKVYNETRKQLADAQRKLAAKRKIAHNELANTLLEYGDTFKVEANSYKSMQARAKATSMTKSGRIRSKKRYGKSIKNRAPSEFLVILKNKLLHYPNGKYYAVPASYACTQFDFTNESFTEHKISERRIVTSDSIQHNRDTLAAFNIKNAIVNDTSTKKKKVTKSKEFFDIVKMKASYNEFCVMERYLLSV

SEQ ID NO: 2880 - protein, 535 aa, unidentified
  REGION 1..535: note = Category: MG91 effectors
  REGION 1..535: note = Description: MG91-71 effector
  source 1..535: note = uncultivated organism sequence
MAQETFVLELPLKVEKWQADILDKRYEYLRQIYNYVQKKLIRQYKYFEQMNEFRQCTTYREKREFFRSHPFYYNEVVGRNGEPFAIKFPYSMSESNGAKLDGFNGYISKLGKLPAGANKTYADLGINSFMLERLASNMWSAWNKFLYDRDAKRVAFKKYGELNTFGSRKKNNISFIGMTIHLDTMELVIKTNGRTGRFAEYITLPIGAGKPLTEYEMYALKGGFDSIKILNVVRKQIRGNNKYYLQMTIEGEKPQKGRTLGVGCVGIDLGPSTIAVSSLQKVSIDKLANKCDDIQRDLNRVSRKMDRSRRANNPQNFNEDGTIKPVSRKNGERRVWNDSKRYRKLREERRELLRKQAAIRKAQHIETANALLPLGDTFIVENNPVSSWTRKSKETKINKKGKIQSKKRFGKSVANHAPSMFATILQNKVESLGGEFRKVEVKNAASRFDFTNGEFTEHGLGERVIALSNGDKHQRDLLAAFNLQHLNADGDTTKDYDVATMQEDYPTFCRLEREEMDLYLQGKKKNERTTIGAFK

SEQ ID NO: 2881 - protein, 524 aa, unidentified
  REGION 1..524: note = Category: MG91 effectors
  REGION 1..524: note = Description: MG91-72 effector
  source 1..524: note = uncultivated organism sequence
MKEVFVLDLPLRVEKYQSDILNKRFEQLRQLYNYVQGKLLRQYRYFEQMKEYQACKTFKEKKDFFRNHPFHINGILGSNKELLDITFDEYGIKGFVEKLVQKGVGTDMTYADLGFTTYILDHLSAGIWSAWDKMLYDYKARRISFKKYGELDSFSSRRKVVQGKVYFSGMELHLDSMMLSVKMNGKVGKAAKFITLPILHNPKHADYEMWALKGGLDSIKVVKVVRRMVRGRYKYYLQMSIEGEKPLKGRKLGKGNVGIDLGPTTVAVSGENIASIDKLASKCDSIETEKAKLGRKIDRSRRANNPQNFNEDGTIKRGIRLEWNDSKRYKELRVEMAELQRRQAAIRKQQHIDRANELLKEGDTFIVENNQISGWTRKAKETKVNENTGKIRKKKRFGKSVANHAPAMFMTILENKVKSLGGKVVKVDTQNAASQYDFTNNSFTKHELNERSVTLSNGDTHQRDMLAAFNLQHLKYDEQEKKQYDTEAMTKHYGRFCELEQAEILRYKNKEKVDDRSTIGAKEL

SEQ ID NO: 2882 - protein, 527 aa, unidentified
  REGION 1..527: note = Category: MG91 effectors
  REGION 1..527: note = Description: MG91-73 effector
  source 1..527: note = uncultivated organism sequence
MNEVFVLELPLQVEKYQADILDKRYEQLRQLYNYVQGKLFRQYRYFEQMKEYQACEKINEKKDFFRTHPFLINETLKGIKTPFMVSFDEYSIKGFIEKLAQKQVGPNMTFADLGFTTYILDHLGASVWAAWDKKLYDFKAKRISFKKYGELDSFSSRRKVVRGVVYFSGMELHLDTMELAIKMNGKVGKEAKFITLKMLHNPKHADYEMWALKGGVEIVKVVKVVRRLVRSQYKYYVQLTIEGEKPQKGRTLGKGNVGIDLGPTTVAVCGENVVSIDKLASKCDNIQEKITRLSRKIDRSRRANNPQNFNEDGTIKRGIKLVWKKDKDLKRYSKLKRELVELRRKQTAIRKQQHIDRANALLKEGDTFIVENNQISSWTMRAKETKVNEKTGRIQKKKRFGKSVANHAPSMFINILENKVKSLGGKVVKVDTKNAASQYDFTDGSFTKHELKERNVTLSNGDTHQRDMLAAFNLQHLKYDEAEAKQYDTEAMAADYERFCQLEQEEIQRYKNKEKKDDRGTIGAEKL

SEQ ID NO: 2883 - protein, 193 aa, unidentified
  REGION 1..193: note = Category: MG91 effectors
  REGION 1..193: note = Description: MG91-74 effector
  source 1..193: note = uncultivated organism sequence
MRRELAELRRKQAAIRKLQHIERANALLKEGDTFIVENNQISSWTTRAKETKVNEKTGKIQKKKRFGKSIANHAPAMFVDILENKVKSLGGEVVKVDTKNAASQYDFTDNSFTKHELKERNVTLSNGDTHQRDMLAAFNLQHLKLDEAKTKQYDTEAMNADYDRFCQLEREEILRYKNKEKKDDKGTIGAEGL

SEQ ID NO: 2884 - protein, 538 aa, unidentified
  REGION 1..538: note = Category: MG91 effectors
  REGION 1..538: note = Description: MG91-75 effector
  source 1..538: note = uncultivated organism sequence
MMVIQKCRLFVIMKEVFVLEMPLLVEKYQEDILNKRFEQLRQLYNYVQGKLLRQYKYFEQMAEFQICKTSKAKREFIKTHPFHINGVIGRNKDLLDISFDEYGILGLVTKLGQKPLGSGKSYADMGISSTILANLSNNIWSAWNKKLYDYHAKRISFKRYGELNSFGSGKIVQKKDNDVKEYFPGFILHLERMELDIKTSKSGKNETCITLPILHNPKHADYEMWALKDGSTSIKVLTIVRRLVRGRYKYYLQMSIEGEKPQKGRTLGKGNVGIDIGPTTVAVSGENIASIDKLASKCDNIQEEITRLARKIDRSRRANNPQNFNEDGTIKRGVRLVWNDSKRYKALRKEMAELQRKQAAIRKQQHIDRANALLKEGDTFVVENNPIKGWQARAKETKIDEKTGRFKSKKGRGKSIGNHAPAMFVTILENKVKSLGGEVVKVDTHNAASQYDFTNESFTDHGYDRKITLSNGDTHQRDMLAAFNLQHLKYDETEKKQYDTEAMVQHYDRFCELEQEEILRYKNKEKKDDRSTIGAGDL

SEQ ID NO: 2885 - protein, 533 aa, unidentified
  REGION 1..533: note = Category: MG91 effectors
  REGION 1..533: note = Description: MG91-76 effector
  source 1..533: note = uncultivated organism sequence
MEEVFVLELPLRVEKYQSDILNKRYEQLRQLYNYVQGKLLRQYRYFEQMREFQDCKTFKEKRDFFRSHPFHINGIMGSNKELLDITFDEYGIQGFVSKLGKKLAGTNTSYADLGITSTILDRLSLAVWSSWEKMLYSLKTKRLAFKKYGELDSLSNRRIVAKGKVCFPGMELHLEKMELAIKLNSKTGKNAKFITLPILHNPKHADYEMWALKGGIDSIKVLTVVRRLVRGQYKYYLQMSIEGEKPQKGRTLGKGNVGIDLGPTTIAVSGENVVSIDKLASKCDNIQKEITRLARKIDRSRRANNPQNFNEDGTVKRGIKLVWNDSKRYKELRREMAELQRRQAAIRKQQHIDRANELLKEGDTFIVENNQISGWTRKAKETKVNEKTGKIQKKKRFGKSVANHAPAMFVTILENKVKSLGGEVVKVDTQNAASQYDFTNDSFEKHELKERSVTLSNGDTHQRDMLAAFNLQHLKYDDKEKKQYDTEAMKEHYERFCELEQEEIQRYKDKEKKDDRSTIGAEKLHMNDGTVKK

SEQ ID NO: 2886 - protein, 528 aa, unidentified
  REGION 1..528: note = Category: MG91 effectors
  REGION 1..528: note = Description: MG91-77 effector
  source 1..528: note = uncultivated organism sequence
MNEVFVLELPLQVEKYQADILNKRYEQLRQLYNYVQGKLLRQYKYFEQMKEYQSCRTFKEKKDFFRNHPFQIKGVLGRNKELLDIFFDEYGIFGLVTKLGQKPMGSGMSYTDMGISSTILANLSYNIWSSWNKKLYDYHADRISFKKHDGLNTFGSGKIVKKKDNEVKEYFPGMVLHLDRMEIDIKTNGGLGKKTTFIALPILYNPKHADYEMMALKGGTKSIKVLTVVRRLVRGQYKYYLQLTIEGEKPQKGRTLGKGNVGIDLGPTTVAISGKNVVSIDKLASKCDNIQEEITRLSRKIDRSRRANNPQNYNEDGTIKRGIKLVWNDSKRYKELRRELAELRRKQAAIRKQQHIDRANALLKEGDTFIVENNQISGWTTRAKETKVNENTGKIQKKKRFGKSVANHAPSMFVSILENKVKSLGGEVVKVDTKNAASQYDFTDGSFTKHELKERNVTLSNGDTHQRDMLAAFNLQHLKYDEAEAKQYDTEAMAADYERFCQLEQEEIQRYKNKEKKDDRGTIGAEKL

SEQ ID NO: 2887 - protein, 528 aa, unidentified
  REGION 1..528: note = Category: MG91 effectors
  REGION 1..528: note = Description: MG91-78 effector
  source 1..528: note = uncultivated organism sequence
MEEVFVLELPLLVEKYQADILNKRYEQLRQLYNYVQGKLLRQYRYFEQMTEFQVCKTFKEKRDFLRSHPFHINGILGSNKALLDITFDDYGINGFVTKLGLKSISNEKTYADIGINSSILAKLSNNIWSSWDKMLYDNKAKRISFKKYGEINSFGCGKKTNGSGKKVFSGMELRLEKMELAIKLNSKTGKNAKFITLPILHNPKHADYEMWALKGGYDSVKVITVVRRMVRGQYKYYLQMSIEGEKPQKGRTLGKGTVGIDIGPTTIAVSGENIVSIDKLAAKCDNIEAEIQRLARKIDRSRRANNPDNFNEDGTVKRGVRLVWKKDKDCKRYAALKREMAELHRRQAAIRKQQHIDRANELLKEGDTFIVENNQISGWVRRAKETKVSEKTGRIQKKKRFGKSVANHAPSMFVTILENKVKSLGGEVVKVDTQNAASQYDFTNNSFEKHELNERSVTLSDGKKHQRDMLAAFNLQHLKYGESEKKQYDTEAMNQHYERFCELEHEEIMRYKNKEKKDDRSTIGAGDC

SEQ ID NO: 2888 - protein, 528 aa, unidentified
  REGION 1..528: note = Category: MG91 effectors
  REGION 1..528: note = Description: MG91-79 effector
  source 1..528: note = uncultivated organism sequence
MNEVFVLELPLQIEKYQADALNKRYEQLRQLYNYVQGKLLRQYRYFEQMKEYQACKKIKEKRFFFRSHPFQINETLKGNKIPFKVSFDEYSIKGYIEKLVQKSVGPNMTYADLGFTTNILDHLGASVWAAWDKKLYDLKAKRISFKKYGELDSFSSRRKVVRGVVYFSGMELHLDSMELAIKMNGKVGKDAKFITLKMLHNPKHADYELWALKGGVDSVKVVKVVRRLVRSQYKYYVQLTIEGEKPQKGRTLGKGNVGIDLGPTTVAVSGVNVVSIDKLASKCDNIQEEITQLSRKIDRSRRANNPQNFNEDGTIKRGIKLVWSDSKRYKELRRELAELRRKQAVIRKQQHIERANALLKEGDTFIVENNPISSWTTRAKETKVNEKTGKIQKKKRFGKSVANHAPSMFVSILENKVKSLGGRFERVSTQNAASQYDFTTDTFKTGEEKHKLNERAITLSNGDTHQRDMLAAFNLQHLKYDEKDAKQYDTEAMAADYERFCQLEQEEILRYKNKVKKDDRGTIGAEKL

SEQ ID NO: 2889 - protein, 521 aa, unidentified
  REGION 1..521: note = Category: MG91 effectors
  REGION 1..521: note = Description: MG91-80 effector
  source 1..521: note = uncultivated organism sequence
MNEVFVLELPLQVEKYQADILNKRYEQLRQLYNYVQGKLLRQYKYFEQMKEYQACKAFKEKKDFFRSHPFQINETLKGNETALKVSFDEYSIKGYIEKLVQKSVGQNMNYADLGFTTNILDHLGASIWAAWDKKLYDFKAKRISFKKYGELDSFSSRRKVVGGKVYFSGMELYLDTMELAIKMNGKVGKEAKFITLKMLHNPKHADYEMWALKGGVESVKVVKVVRRLVRSQYKYYVQLTIEGEKPQKGRTLGKGNVGIDLGPTTVAVSGENIVSIDKLASKCDNIQEEITRLSRKIDRSRRANNPQNFNEDGTIKRGIKLVWNDSKRYKELRRELAELRRKQAAIRKQQHIDRANALLKEGDTFIVENNQISGWTTRAKETKVSEKTGKIQKKKRFGKSVANHAPSMFVSILENKVNSLGGQVVKVDTQNAASQYDFTDGSFTKHELKERNVTLSNGDVHQRDMLAAFNLQHLTGEKRQYDVEAMKRDYERFCQLEQEEIQRYKNKEKKDDRGTIGAEKL

SEQ ID NO: 2890 - protein, 605 aa, unidentified
  REGION 1..605: note = Category: MG91 effectors
  REGION 1..605: note = Description: MG91-81 effector
  source 1..605: note = uncultivated organism sequence
MVEEFVLTLPLKVEPWQADILNNRYEHLRRMYNMVQRKLLRHYIYLSQQKAYRQCKDNDEKRTFWENQPITFKDLCDKNGNPAIVRFPHTYYTRSKASGKRTSNGIPDLLPKFKNRNIGSGLTYASLGINAAILENLGLRIEQAWKKRLYDPKSKHISFKDEGDLNTFGCREKDGFSGFVLDLPRMMLSFNINGKQKSQAKFIHLPINAGKELTEYEMYALKGGLDSIRKIIIAREYVRGRYKYYVQLTIKGEKPQKNRTLGNGSVGIDVGPSTVAISSLQGVTLDKLADKCDDIEHDLWRINRKMDRSKRKTNPDFFNDDKTYKKRKRGERRIWHFSKRYKRLKLERRELYRKQAAIRKQQHIDMANALLSQGDEFIVENNPIDSWAKCAKETKKNKNGKNRCKRRFGKSIAHHAPAMFISILHNKVRSLGGSFSKVEIKNAATQFDFTNGEFTKHELNERIVTLSDGRTHQRDMLSAFNLQHLRPESEEIKDYDIEQMEVDYPIFCKLEEQGIAIFKEKRPQDRDVAYFVGTSHKTLKISSANRHNGGVGRKNCNHHAGKRKNVAKAVTKSSSKKNCESLESVSVVPNEYHHSDNQHLRLDRL

SEQ ID NO: 2891 - protein, 525 aa, unidentified
  REGION 1..525: note = Category: MG91 effectors
  REGION 1..525: note = Description: MG91-82 effector
  source 1..525: note = uncultivated organism sequence
MNNETFIMELPLIVEKFQSDELDKRFEILRRIYNMAQNKLERQFCYLSKFKEYQECTTKKAKGEFIKKHPFSFKDILDKSGNPLMITFTKYDIQGYLSKFAKLKIDSQYTYSDMGINTSMLMHMGMAIWSAWEKVIFDSKADKISYKKYGDLKSIGVDWEPKHPAGFILNLQKGELKLNLNNRQGQYARYITMKIRFGRKEHQVWYEGDALNAGEDSIRVLTIVRRKIRGRYNYYLQMTIRNNKPQKGRTLGEGRVAIDLGTSKIAVVAKDKVHLLPLSPSILSVSDELRIIQRQMDRSRRANNPQKYHEDGTVKKGNHDKWVNSKEYIRLRNMKAELERKQAAVRKQDHIALANYLLSLGNEFVIEDNDVQEWAKRKKEEKRRKSDGKNLSKAGLGKQIGNHAPSMFVTILKNKVESLGGTFVKVDNNNRATDYDFTNNTFNEHKLEERYITLGNGNRHQRDTLAAFNLYHLDTAPEKEKCYNLYEMRKHYAQFCEFEKEALLRWKGMTPKREKMKVREHERGL

SEQ ID NO: 2892 - protein, 490 aa, unidentified
  REGION 1..490: note = Category: MG91 effectors
  REGION 1..490: note = Description: MG91-83 effector
  source 1..490: note = uncultivated organism sequence
MARENENSGCFVVTFPLKTEKWQEDRIDKILTLLTVRYREKQKILLDRYIHLSHSPEFKEAKKTGLKAFRDFMNEHNFTKYDVEKVFSDSSLSKSVTADIMLTYGINSDIMQELSHRAWSAWEKKLYGQGKFIRLDNEVTLFKSRSHKGNVTGFEYSFTEMTLSMNATKPKKHTMFTIPFVVNRKSEYEAYALGCEVKNIAIMRQQIRGKNKYYVQFSFAGTPYNKGRKMGTGIVGIDPGPSKIAIVSDSEIRITTLAPSVTKDEKAVCRLQRKLDRSRRATNPDNYNDDGTIKRGIKLKFEKSNSYKRTQTKLADMQRKLAAKRKIDHNILANEIITMGNEFRVEKNSFKSMQVRSKETKKNDKGKNLSKKRWGDSLSNHAPAELLTILKNKVCQYADGEYVDIPSSVACTAFDFTNGEFTKHPPKERTITTSDGFVHDRDALAAFNMRFVHKKKIEGKKKIEKDKENFDILAMTEAYRQFCSLEKNIK

SEQ ID NO: 2893 - protein, 528 aa, unidentified
  REGION 1..528: note = Category: MG91 effectors
  REGION 1..528: note = Description: MG91-84 effector
  source 1..528: note = uncultivated organism sequence
MEEVFVLELPLQVEKYQADILNKRYEQLRQLYNYVQGKLLRQYRYFEQMTEFQVCKTFKEKRDFFRSHPFHINGILGSNKELLDITFDDYGINGFVTKLGLKSIGNGKTYTDIGINSAILEKLSDNIWASWDKMLYDYKAKRISFKRYGELNSFGCRKKLNGSRKKVFSGMELRLDKMELAIKLNSKTGKNAKFITLPILHNPKHADYEMWALKGGYDSVKVITVVRRMVRGQYKYYLQMSIEGEKPQKGRTLGKGTVGIDIGPTTIAVSGENIVSIDKLAAKCDNIEAEIQRLARKIDRSRRANNPDNFNEDGTVKRGVRLVWKKDKDCKRYAALKREMAELHRRQAAIRKQQHIDRANELLKEGDTFIVENNQISSWVRRAKETKVSEKTGRIQKKKRFGKSVANHAPSMFVTILENKVKSLGGEVVKVDTQNAASQYDFTNNSFEKHELNERSVTLSDGKKHQRDMLAAFNLQHLKYGESEKKRYDTEAMNQHYERFCELEHEEIMRYKNKEKKDDRSTIGAGDL

SEQ ID NO: 2894 - protein, 524 aa, unidentified
  REGION 1..524: note = Category: MG91 effectors
  REGION 1..524: note = Description: MG91-85 effector
  source 1..524: note = uncultivated organism sequence
MKEVFVLELPLRVEKFQEDILNKRYEQLRQLYNYVQGKLLRQYRYFEQMKEFQACTTLKDKRDFIRTHPFHIYGVYGKNGDLFDITFDEYGINGFVAKLGKKLVGTNTTYADLGITSTILDRLSLAIWASWEKMLYSFHTKRLSFKKYGELDSLSNRRIVVRGKVCFPGMELHLEKMELAIKLNSKTGKNAKFITLPILHNPKHADYEMWALKGGIDSIKVITVVRRLVRGQYKYYLQMSIEGEKPQKGRTLGKGNVGIDIGPTTVAVSGENIASIDKLASKCDNIQEEITRLARKIDRSRRANNPENFNEDGTIKRGVRLVWNDSKRYKALRKEMAELQRRQAAIRKQQHIDRANELLKEGDTFIVENNQISGWTRKAKETKVNEKTGKIQKKKRFGKSVANHAPSMFVTILENKVKSLGGEVIKVDTQNAASQYDFTNNSFEKHELKERSVTLSNGDTHQRDMLAAFNLQHLKYDAQEKKQYDTEAMAQHYERFCELEQAEIMRYKNKEKKDDRSTIGAGDL

SEQ ID NO: 2895 - protein, 524 aa, unidentified
  REGION 1..524: note = Category: MG91 effectors
  REGION 1..524: note = Description: MG91-86 effector
  source 1..524: note = uncultivated organism sequence
MNDVFVLELPLQVEKYQADILNKRYEQLRQLYNYVQGKLLRQYRYFEQMKEYQACKTIKEKRDFFKSHPFQVNESLGGDKSAFEISFNEFSIKGFIEKLVQKSVGANMTYADLGFTTNILDHLGASVWAAWDKKLYDFKAKRISFKKYGELDSFSSRRKVVGGKVYFSGMELHLDTMELAIKMNGKQGNNAKFITLKMQHNPKHAEYEMWALKGGVDSVKVVKVVRRLVRSQYKYYVQLTIEGEKPQKGRTLGMGNVGIDLGPTTVAVSGENVVSIDKLASKCDNIQEGITRLSRKIDRSRRANNPQNFNEDGTIKRGIKLVWNDSKRYKELRRELAELRRKQAAIRKQQHIERANALLKEGDTFIVENNQISGWTTRAKETKVNEKTGKIQKKKRFGKSVANHAPSMFVSILENKVKSLGGEVVKVDTKNAASQYDFTDNSFTKHELKERNVTLSNGDTHQRDMLAAFNLQHLKYDEKENKQYDKEGMKAHYERFCKLEQEEIQRYKNKEKKDDRGTIGAKKL

SEQ ID NO: 2896 - protein, 490 aa, unidentified
  REGION 1..490: note = Category: MG91 effectors
  REGION 1..490: note = Description: MG91-87 effector
  source 1..490: note = uncultivated organism sequence
MARENENSGCFVVTFPLKTEKWQEDRIDKILTLLTVRYREKQKILLDRYIHLSHSPEFKEAKNAGLKALRDFMNEHKFTKYDVEKVFSDSSLSKSVTTDIMLTYGINSDIMQELSHRAWSAWEKKLYGQGKFIRLDNEVTLFKSRSHKGNVTGFEYSFTEMTLSMNATKPKKHTMFTIPFVVNRKSEYEAYAMDCEVRNIAIMRQQIRGKNKYYVQFSFAGTPYNKGRKIGTGIVGIDPGPSKIAIVSDSEIRITTLAPSVNRDERAICRMQRKLDRSRRATNPDNYNDDGTIKRGIKLTFEKSNSYKRTQAKLADTQRKLAAKRKIDHNILANEIIAMGNEFHVENNSFKSMQARSKETKKNDKGKNMSKKRFGKSLANRAPSELLTILKNKVNQYADGDYVDIPSGVACTQFDFTNGEFTKHELKERTITTSDGVVHDRDALAAFNMRFVHKKKVEGKKKIEKDKENFDILAMTEAYRQFCSLEKNIK

SEQ ID NO: 2897 - protein, 527 aa, unidentified
  REGION 1..527: note = Category: MG91 effectors
  REGION 1..527: note = Description: MG91-88 effector
  source 1..527: note = uncultivated organism sequence
MNEVFVLELPLQVEKYQEDILERRFEQLRQLYNYVQGKLLRQYRYFEQTKEFQACKTIKEKRDFFRNHPFHFNGIYGNNNELFNITFDEYGVNGFVSKMAKKQVGANMTYADLGITTTLLDRLSLAIWASWEKKLYDYHTKRISFKKHGELNIFGSRKKTNGSGKKMFSGMELNLERMEVSIKLNGKVGKKAKYITLPILHNPKHVDYEMLALKGGFDSVKVITVVRRLVRGRYKYYLQMSIEGEKPKKDRTLGKGNVGIDIGPTTVAVSGENIASIDKLASKCDSIEVEKARLGRKIDRSRRANNPQNFNEDGTIKRGVRLVWNDSKRYKVLRREMTELQRRQAAIRKQQHIDRANELLKEGDTFIVENNQISGWTRKAKETKVNEKTGKIQKKKRFGKSVANHAPSMFVTILENKVKSLGGQVVKVDTKNAASQYDFTNDSFEKHELNERSVTLSNGDTHQRDMLAAFNLQHLKYDAQEKKQYDREAMTQHYDRFCKLERAEIMRYKNKEKRDDRSTIGAGELNT

SEQ ID NO: 2898 - protein, 528 aa, unidentified
  REGION 1..528: note = Category: MG91 effectors
  REGION 1..528: note = Description: MG91-89 effector
  source 1..528: note = uncultivated organism sequence
MNEVFVLELPLKVEKYQADILNKRYEQLRQLYNYVQGKLLRQYRYFEQMKEFQECKSFKSKREFIKAHPFQIKGVMARNKELLDIFFDEYGILGLVTKLGQKPIGSGKTYTDMGISSTILANLSDNIWSSWNKKMYDYHADRISFKKFGELNTFGSGKIVQKKDNEVKEYFPGMVLHLDKMEIDIKTNGALGKKATFITLPILHNPKHVDYEMMALAGGSRSIKVLTIVRRMVRGQYKYYVQLTIEGGKPQKGRTLGKGNVGIDLGPTTVAVSGENVVSIDKLASKCDNIQEEITRLSRKIDRSRRANNPQNFNEDGTIKRGIKLVWNDSKRYKELRRELAELRRKQAAIRKQQHIDRANALLKEGDTFIVENNQISGWTTRAKETKVNEKTGKIQKKKRFGKSVANHAPSMFVSILENKVKSLGGEVVKVDTKNAASQYDFTDGSFTKHELKERNVTLSNGDTHQRDMLAAFNLQHLKYDEKDTKQYDTESMAADYERFCQLEQEEIQRYKNKEKKDDRSTIGAEKL

SEQ ID NO: 2899 - protein, 579 aa, unidentified
  REGION 1..579: note = Category: MG91 effectors
  REGION 1..579: note = Description: MG91-90 effector
  source 1..579: note = uncultivated organism sequence
MIEEFVLTLPLKVEKWQADILNNRYEHLRHIYNMVQRKLLRQYIYYSQQTEYRNCKSNDERREFWGNHPFTIKGICDQKGNSPIVKFPYTYSSRSKGSGKRASNGISDLLPKLKHYNIGSGKTYGSLGLNASILENLGLSIQQAWEKRLYDKKSRHISFKKEDELNTFGCRFKRGFSGINLDLSKMILSLNINGRQHNLAKYINLSINPNKKFTEYEEYALKGGISSIKKIVILREYIRGRYKYYVQLTIEGEKPQKNRTLGVGTVGIDVGPSTVAVSSLYCVSFNKLADKCDDIEHDLWLVNRKMDRSKRATNPGFFAADGTYIKRKKGERRKWKFSHRYENLRSVRRELYRKQAVVRKQQHIAMANEMLSQGDTFIVENNPVDSWTRRAKETKKNKKGKMRCKRRFGKSVVHHAPAMFVSILENKVRSLGGTFHKADIKNAATQFDFTNGELKKHELKERTVTLSNGKTHQRDMLAAFNLQHLRVDSTKDKDYDVEQMILDYPVFCKLEEQETTSFIEAKGKDKDAAYFAGISSKETNRSSNRHNGGVERKHCNNHEEKGDAAKSGKKNFQEGFPRA

SEQ ID NO: 2900 - protein, 849 aa, unidentified
  REGION 1..849: note = Category: MG91 effectors
  REGION 1..849: note = Description: MG91-91 effector
  source 1..849: note = uncultivated organism sequence
MKEEDIIKFSDSLKGLGTNKKGVALILRNPIKITEDSAVQGVIIDNKPDRKEGIDRLDYIVYDRENGMHRSPATEGNFDQEVPYHILSRFEDLMDCGKLIPVVFEDSVNPFSTDITFKHNDPLKNDKKAFWNYPLDKEQFEASSSVRFYKSVLAPRNFSESNTFNCKTEEASLYFAVENARRLSKRGSAVRDFRNKDIWTVSLDNADESKPLDVETAEFFATKSIRSSILNMGDTKVFQALFDSKKNAIAFASDYANWMTKAEIAVGKLLGFNIPSNIQDQGMDLLGGDKKYIDCYLQKNFYTEEFQERPFGELLDNTLKWIREYGANPDEENIKAVSESLDKIAFDKYVVEGIHLDYFFQEPITLDDGRKIVGFGKNLGKDNVTWAAKAYTTNADNTAVEKVDFKDLPHDGLKKAIEKLDSPYHPHIDFGDKKLNVYKMDRVAYSLYQRISNVGAKSFTPSEASQAELFFKQLPEEIRQPMAVYLENLVRKNINEKEVSLPEKWFTSAFEELEKIAKDGLPIKYNLKHADYEMTALAGGIDSIKLLTVVRRLVRGKYKYYLQITIKGKKPQKGRELGSGKVGIDLGASTIAVCGDNIVSIDKLAAKCDYIQKDVKKIQRKMDRSRRANNPDNYNENGAIKKGKKLVWKNSNRYKALCKQYAEIKRKQAAVRKIEHIERANNLLKEGNIFITEKNPIKEWAKKSEETEINPKTGKTKSKKKYGKSISVHAPGMFIEILKNKVVSLGGKFIKDNPENAASEYDFTNDTFTDHGFDRTITLSNGDKHQRDTLAAFNIKNRKYDEEEPKQYNREQMQKEYARFCELEREEIEKYKNGTKKDYRRTIAAYKLY

SEQ ID NO: 2901 - protein, 607 aa, unidentified
  REGION 1..607: note = Category: MG91 effectors
  REGION 1..607: note = Description: MG91-92 effector
  source 1..607: note = uncultivated organism sequence
MAKEEFVLTLPLKVEKWQADILDKRYELLRQVYNMVQQKLVRQYIYFSQQKAYRDCKNFEQRRGFFEAHPFHVKSVKGKNGELCDIKFPYTYKSRGGSSGKRAPNGISDYVSKLWSHKIGQNKTLADFGINSYIMEELGLHIMKAWEDRLYKPKSKRVSFKDYGEINSFGSRNKNGNFAGFTINLDNGIITYKTNGRQGQFADLIQLPIDFSREKNGYASEALKGGIESLKKLLIVRRCIRGENKYYLQLTISGEKPQKGRTLGKGNVGIDIGPSTIATSSLNGVYFDKLADKCDNIEHELYLINRKLDRSRRANNPQNYNEDGQIKRGVRLVWKKDKDVKRYATLKLQRKELYRKQAEIRKLQHLEMANAMLSEGDTFIVENNPIDAWVRRTKETTKTKAGKNRCKKRYGKSVANHAPAMFVSILKNKVLSLGGKFYEIDPRNAATQFDFSNGEFTKHEVSERSITLSNGRTHQRDMLSAFNLQHIVLQNKELKEYDIEQMEADYPIFCRLENTELERFKEARHKERDALYFAGASEKQMRRQPQEESVANRHNGGVGRKHCNTSLGGGNAKITGNGLARESIERVSQVPDERHLSGCVPISLDGL

SEQ ID NO: 2902 - protein, 524 aa, unidentified
  REGION 1..524: note = Category: MG91 effectors
  REGION 1..524: note = Description: MG91-93 effector
  source 1..524: note = uncultivated organism sequence
MKEVFVLELPLQVEKYQADILNKRYEQLRQLHNYVQGKLLRQYRYFEQMKEFQACKTFKEKKDFFRNHPFHVNGIWGSNKELLDITFDEYGINGFVEKLVQKSVGSDMTYADLGFTTNILDHLSASIWRAWDKMLYDYHAKRVSFKKYGELDSFSSRRKVVGGKVYFSGMELHLDTMVLSIKLNGKQGKSAKFLTLPILHNPKHADYEIWALKGGLDSVKVVKVVRRMVRGNYKYYLQMSIEGEKPQKGRTLGKGNVGIDLGPTTVAVSGNNVVSIDKLAAKCDNIQAEIARLGRKIDRSRRANNPHNFNEDGTIKRGVRLVWNDSKRYKALRRDMAELQRRQAAIRKQQHIDRANALLKEGDTFIVENNQISGWTRKAKETKVNEKTGKIQKKKRFGKSVANHAPAMFVTVLENKVNSLGGKVVKVDTKNAASQYDFTNGSFEKHELKERNVTLSNGDTHQRDILAAFNLQHLKYDEKEKKQYDVESMKAHYERFCYLEQAEIMRYKNKEKKDDRSTIGAEKL

SEQ ID NO: 2903 - protein, 515 aa, unidentified
  REGION 1..515: note = Category: MG91 effectors
  REGION 1..515: note = Description: MG91-94 effector
  source 1..515: note = uncultivated organism sequence
MELPLQVEKYQEDILNKRYEQLRQLYNYAQGKLLRQFRYFEQMKDYQLCKTFKEKKDFFKNHPFQINGILGSNKQPLDITFDEYGINGFVEKLVQKSAGPNITYADLGITTTILDHLSSSIWRAWDKMLYDYHAKRVSFKKYGELDSFSSRRKVVGGKVYFSGLELHLDTMKLSVKLNGKQGSNAKFITMPILYNPKHEDYELWALKGGLESVKVVKVIRRLVRSQYKYYVQLTIEGEKPQKGRTLGKGNVGIDLGPTTVAVSGENIASIDKLASKCDNIQKEITRLARKIDRSRRANNPENFNEDGTIKRGVRLVWNDSKRYKALRKEMAELQRRQAAIRKQQHIDRANALLKEGDTFIVENNQISAWVRKAKETKVNEKTGKIQKKKRFGKSVANHAPAMFVTILENKVKSLGGEVVKVDTQNAASQYDFTNDSFEKHELNERSVTLSNGDTHQRDMLAAFNLQHLTAEKKQYDREAMAQHYDRFCELEQTEIERYKNKEKKDDRSTIGAGGL

SEQ ID NO: 2904 - protein, 413 aa, unidentified
  REGION 1..413: note = Category: MG91 effectors
  REGION 1..413: note = Description: MG91-95 effector
  source 1..413: note = uncultivated organism sequence
MKENGFSQYGLDAFFKADTKGALYQCGVNSMFLQYLSQCAWSAWDKKLFGKGDFVKTDKVVNIFCSRNKKERFCGFDYDLSTFTISIKSTCTKKIICTIPFVVNKKSDYELFALSQRICRIGIVRKLIRGKYKYYVQFTFDGVPYHKGRNIGTGIVGIDPGPSKIAIVGDNKVEIAKLAPNIEEDERKTARLKRKLDRSRRATNPHMYKEDGTIIKGQRQTCFSKVYNETRKQLADAQRKLAAKRKIAHNELANTLLEYGDTFKVEANSYKSMQARTKATSMTKSGRIRSKKRYGKSIKNRAPSEFLVILKNKLLHYPNGKYYAVPASYACTQFDFTNESFTEHKISERKIVTSDGVQHNRDTLAAFNIKNAIVNETSTKKKKITKSNEFFDIVRMKASYNEFCLMERYLLSI

SEQ ID NO: 2905 - protein, 527 aa, unidentified
  REGION 1..527: note = Category: MG91 effectors
  REGION 1..527: note = Description: MG91-96 effector
  source 1..527: note = uncultivated organism sequence
MNEVFVLELPLQVEKYQADILNKRYEQLRQLYNYVQCKLLRQYRYFEQMNEYQACEKIKEKRDFFRAHPFQINEKLKGKNTPITVSFDEYSIKGFIEKLAQKQVGPNKTYADLGFTTYILDHLGASVWAAWDKKLYDFKAKRISFKKYSELDSFSSRRKVVRGVVYFSGMELHLDTMELAIKMNGKVGKDAKFITLTMLHNPKHADYEMWALKGGVDSVKVVKVVRRLVRSQYKYYVQLTIEGEKPQKGRTLGKGNVGIDLGPTTVAVCGENIVSIDKLASKCDNIQSKITRLSRKIDRSRRANNPDNYNEDGTIKRGVKLVWEKEKNLKRYSKLKRELAELRRKQAAIRKLQHIERANALLNEGNTFIVENNPVKAWVRRAKETKVDEKTGKYKSKRGSGRSVGSHAPAMFVDIMENKVKSLGGRFERVDTQNAASRFDFTDGSFTEHDRSVRAVTLSNGDTHQRDMLAAFNLQHLQLDEAKTKQYDTEAMAADYERFCQLEQEEIQRYKNREKKDDRSTIGAEKL

SEQ ID NO: 2906 - protein, 484 aa, unidentified
  REGION 1..484: note = Category: MG91 effectors
  REGION 1..484: note = Description: MG91-97 effector
  source 1..484: note = uncultivated organism sequence
MAHKENQKAFVVTFPLRTEKWQEDRIDKMMRMLTTFYNDRQRKLVRRYIYLSHSKAYKEAKGKGVVAFKNYMKENGFSQYGLDAFFKADTKGALYQCGLNSMFLQYLSQCAWSAWDKKLFGKGDFVKTDKVVNIFCSRNKKERFCGFDYDLSTFTISIKSTCTKKIICTIPFVVNKNSEYELYALSQKICRIGIVRKLIRSKYKYYVQFTFDGVPYNKGRNIGTGIVGIDPGPSKIAIVGDNKVEIAKLAPNIEEDERKTARLKRKLDRSRRATNPHMYKEDGTNIKGQRQICFSKSYNETRKQLADAQRKLAAKRKIAHNELANTLLEYGDTFKVEANSYKSMQARAKATSMTKSGRIRSKKRYGKSIKNRAPSEFLVILKNKLLYYPKGKYYDVPSSYACTQFDFTNESFTEHKISERRIVTSDGIQHNRDTLAAFNIKNAIVNDTSTKKKKVTKSKEFFDIVKMKASYNEFCLMERYLLSV

SEQ ID NO: 2907 - protein, 525 aa, unidentified
  REGION 1..525: note = Category: MG91 effectors
  REGION 1..525: note = Description: MG91-98 effector
  source 1..525: note = uncultivated organism sequence
MNEVFVLELPLQVEKFQVDILNKRYEQLRQLYNYVQGKLLRQYRYFEQMKEYQACKTFKEKKDFFRSHPFQINETLKGNETAFKVSFDEYSINSYIEKLVQKSVGSNMTYSDLGFTTNILDHLSASIWAAWNKKLYDFKAKRISFKKYGELDSFSSRRKVVRGVVYFSGIELHLDTMELAIKMNGKVGKEAKFITLKMLHNPKHAEYEMWALKGGVDSVKVVKVVRRLVRSQYKYYVQLTIEGEKPQKGRTLGRGNVGIDLGPTTVAVSGENVVSIDKLASKCDNIQEEITRLSRKIDRSRRANNPQNFNEDGTIKRGIKLVWNDSNRYKELRRELAELRRKQAAIRKQQHIDRANSLLKEGDTFIVENNQISSWTTRAKETKVNEKAGKIQKKKRFGKSVANHAPSMFVSILENKVKSLGGEVVKVDTKNAASQYDFTDGSFTKHELKERNVTLSNGDTHQRDMLAAFNLQHLKYEEKDKTKQYDTDAMKKDYERFCQLEQEEIQRYKNKEKKDDSSTIGAGEL

SEQ ID NO: 2908 - protein, 535 aa, unidentified
  REGION 1..535: note = Category: MG91 effectors
  REGION 1..535: note = Description: MG91-99 effector
  source 1..535: note = uncultivated organism sequence
MAQETFVLELPLKVEKWQADILDKRYEYLRQIYNYVQKKLIRQYKYFEQMNEFRQCTTYRDKREFFRNHPFYYNEVVGRNGEPFAIKFPYSMSESNGAKLDGFNGYISKLGKLPVGANKTYADLGINSFMLERLASNMWSAWNKFLYDRDAKRVAFKKYGELNTFGSRKKNNISFIGMAIHLDTMELVIKTNGRNGQFAEYITLPIGTGKPLTEYEMYALKSGFDSIKILNVVRKQIRGNNKYYLQMTIEGEKPQKGRTLGEGCVGIDLGPSTIAVSSLQKVSIDKLANKCDDIQRDLNRVSRKMERTRRANNPHYINEDGTIKPISRKSGERRVWHDSKRYKKLREERKELLRKQAAIRKAQHIETANALLPLGDTFIVENNPVSSWTRKSKETKINKKGKIQSKKRFGKSVANHAPSMFATILQNKVESLGGQFRKVEVKNAASRFDFTNGEFTEHGLGERVIALSNGDKHQRDLLAAFNLQHLNADGNSTKDYDVATMQKDYPTFCRLEREEMDLYLQGKKKNERTTIGAFK

SEQ ID NO: 2909 - protein, 528 aa, unidentified
  REGION 1..528: note = Category: MG91 effectors
  REGION 1..528: note = Description: MG91-100 effector
  source 1..528: note = uncultivated organism sequence
MKEVFVLELPLRVEKYQADILNKRYELLRQLYNYVQGKLLRQYRYFEQMKDYQICKTFKDKREFIKAHSFHINGVLGRNKELLDISFDEYGIMGLVTKLGQKLIGSGKTYTDMGISSTILANLSDNIWSSWNKKLYDYHADRITFKKYGSLNTFGSGKIVQKKDNEVKEYFPGMVLHLERMEIEIKTNGGLGKKATFITLPILHNPKHADYEMMALAGGSSSIKVLTIVRRLVRGQYKYYLQMSIEGEKPQKGRMLGKGNVGIDLGPTTVAVSGENIACIDKLASKCDNIQAEITKLARKIDRSRRANNPQNYNEDGTIKRGIKLVWYDSKRYKELRRELAELRRKQAAIRKQQHIDRANALLKEGDTFIVENNQISGWTTRAKETKVNEKTGKIQKKKRFGKSVANHAPSMFVTILENKVKSLGGQVVKVDTQNAASQYDFTNDSFTKHELKERNVTLANGDTHQRDMLAAFNLQHLKYDAKEKKQYDKEAMKAHYEHFCELEQEEIQRYKNKEKKDDRSTIGAEKL

SEQ ID NO: 2910 - protein, 509 aa, unidentified
  REGION 1..509: note = Category: MG91 effectors
  REGION 1..509: note = Description: MG91-101 effector
  source 1..509: note = uncultivated organism sequence
MRKKTTDENFIMELPLTVDKFQSDELYKRFELMRRIYNSAQNKLKRQYEYLSSFKAYKECKTKKEKGDFLKAHPFSFRGVLDKDGEPLKITFSEYDLKSYLSKFAKQKVDSQYTYSDFGINTSMLMHMAMAIWSAWKKVLYDPKAQEVSFKKHGELQSIGVDWEPKHPAGLILDLQKGELKVNLNNRQGQYARYITMKIKFGHKEHQIWYEGDALNAGEDSIRGLTIVRRKIRGKYNYFLQMTIRNNKPQKGRTLGTGRVAIDLGTCKIAVVTKNSVRLIPLAPSISSYSDELRIIQRQMDRSRRANNPQKYHEDGTIKKGNHDKWISSKEYIRLRDIKAELERKQAAVRKQDHIALANYLLSLGNEFVIEDNDVQEWAKRKKEEKKREKDGKNLSKAGLGKQIGNHAPAMFVTILKNKVESLGGSFIKVDTDNGATDYDFTNDEFTHHELEERYITLSDGKRHQRDTLAAFNLYHINTVQNRVYDRLAMQRHYAWFCEKEAESVEQYK

SEQ ID NO: 2911 - protein, 525 aa, unidentified
  REGION 1..525: note = Category: MG91 effectors
  REGION 1..525: note = Description: MG91-102 effector
  source 1..525: note = uncultivated organism sequence
MNEVFVLELPLMVEKYQADILNKRYEQLRQLYNYVQGKLLRQYRYFEQMADYQVCKTIREKRDFLKNHPFNINGVLDRRGKLLDITFDEYGIQGFVEKMIHKSVGNNISYADLGLNTLILDYLAASIWRAWDKKLYDLNAKRISFKKHGELDSFSSRRKVVNGTARFFGLELYLDKMELAVKVNGKQGKNAKFITLKIQHNPKHVDYEMWALKGGVDSVKVVKVVRRLVRSQYKYYVQLTIEGEKPQKGRTLGKGNVGIDLGPTTVAVSGKNVVSIDKLASKCDNIQEEITRLSRKIDRSRRANNLQNFNEDGTIKRGIKLVWNDSKRYKELRRELAELRRKQAAIRKQQHIDRANALLKEGDTFIVENNPVKAWAARAKETKVNEKTGKIQSKKRGGKSIGNHAPAMFVDILENKVKSLGGTFIRANTNNAASQYDFSNNSFKEGEDRHGLNERAITLSNGNTHQRDMLAAFNLQHLTDEKKQYDVEAMKRDYERFCQLEQEEIQRYKNKEKKDDRSTIGAEKL

SEQ ID NO: 2912 - protein, 524 aa, unidentified
  REGION 1..524: note = Category: MG91 effectors
  REGION 1..524: note = Description: MG91-103 effector
  source 1..524: note = uncultivated organism sequence
MNEVFVLELPLLVERYQADILNKRYEQLRQLYNYVQGKLLRQYRYFEQMKEYKACEKIKEKRDFFRAHPFHINGVLNGNKEQLDITFDKNGINGFVEKLAQKSAGPNITYADLGFTTYILDHLSASIWAAWEKKLYDFKAKRISFKKYGELDSFSSRRKVVGGKVYFSGMELHLDTMKLSIKMNGKQGDNAKFITLKMLHNPKHTDYEMWALKGGVDSVKVVKVVRRLVRSQYKYYVQLTIEGEKPQKGRKLGKGNVGIDLGPTTVAVSGENVVSIDKLASKCDNIQEEITRLSRKIDRSRRANNPQNFNEDGTIKHGIKLVWNDSKRYKELRRELAELRRKQAAIRKLQHIERANTLLKEGDTFIVENNQISGWATRAKETKVNEKTGKIQKKKRFGKSVANHAPSMFINILENKVKSLGGEVVKVDTKNAASQYDFTDGSFTKHELKERNVTLSNGDTHQRDMLAAFNLQHLKYDEAEAKQYDTEAMAADYERFCQLEQEEIQRYKNKEKKDDRGTIGAEKL

SEQ ID NO: 2913 - protein, 484 aa, unidentified
  REGION 1..484: note = Category: MG91 effectors
  REGION 1..484: note = Description: MG91-104 effector
  source 1..484: note = uncultivated organism sequence
MAHKENQKAFVVTFPLHTEKWQEDRIDKMMRMLTTFYNDRQRKLVRRYIYLSHSKAYKEAKGKGVVAFKNYMKENGFSQYGLDAFFKADTKGALYQCGLNSMFLQYLSQCAWSAWDKKLFGKGDFVKTDKVVNIFCSRNKKERFCGFDYDLSTFTISIKSTCTKNIICTIPFVVNKKSDYELYALSQKICRIGIVRKLIRSKYKYYVQFTFDGVPYNKGRNIGTGIVGIDPGPSKIAIVGDNKVEIAKLAPNIEEDERKTARLKRKLDRSRRATNPHMYKEDGTNIKGQRQICFSKSYNETRKQLADAQRKLAAKRKIAHNELANTLLEYGDTFKVEANSYKSMQARAKSTSMTKSGRIRSKKRYGKSIKNRAPSEFLVILKNKLLYYPKGKYYDVPSSYACTQFDFTNESFTEHKISERRIVTSDGIQRNRDTLAAFNIKNAIVNDTSTKKKKVTKSKEFFDIVKMKASYNEFCVMERYLLSV

SEQ ID NO: 2914 - protein, 524 aa, unidentified
  REGION 1..524: note = Category: MG91 effectors
  REGION 1..524: note = Description: MG91-105 effector
  source 1..524: note = uncultivated organism sequence
MEEVFVLELPLQVEKYQADILNKRYEQLRQLYNYVQGKLLRQYRYFEQMAEFQACKTIREKRDFFRSHPFHINGKLAGNKELPEITFDEYGINGFVEKMAQKSVGTNMTYADLGFTTYILDHLSASIWTAWEKKLYDYRATRISFKKYGELDSFSSRRKVVRGKAYFSGVELHLDSMELAIKLNGKVGKNAKFITLPILHNPKHADYEMWALKGGLDSVKVVKVVRRLVRGQYKYYVQLSIEGEKPQKGRTLGKGNVGIDIGPTTVAVSGENIASIDKLASKCDNIQEEITRLARKIDRSRRANNPENFNEDGTIKRGVRLVWNDSKRYKALRKEMAELQRRQAAIRKQQHIDRANALLKEGDTFIVENNQISGWTRKAKETKVNEKTGKIQKKKRFGKSVANHAPAMFVTILENKVKSLGGKVIKVDTQNAASQYDFTNNSFEKHELKERSVTLSNGDTHQRDMLAAFNLQHLKYDKAEKKQYDTEAMAQHYERFCELEQEEIMRYKKKEKKSDRSTIGAEEL

SEQ ID NO: 2915 - protein, 526 aa, unidentified
  REGION 1..526: note = Category: MG91 effectors
  REGION 1..526: note = Description: MG91-106 effector
  source 1..526: note = uncultivated organism sequence
MKEVFVLEMPLLVEKYQEDILNKRFEQLRQLYNYVQGKLLRQYKYFEQMAEFQICKTSKAKREFIKTHPFHINGVIGRNKDLLDISFDEYGILGLVTKLGQKPLGSGKSYADMGISSTILANLSNNIWSAWNKKLYDYHAKRISFKRYGELNSFGSGKIVQKKDNDVKEYFPGFILHLERMELDIKTSKSGKNETCITLPILHNPKHADYEMWALKDGSTSIKVLTIVRRLVRGRYKYYLQMSIEGEKPQKGRTLGKGNVGIDIGPTTVAVSGENIASIDKLASKCDNIQEEITRLARKIDRSRRANNPQNFNEDGTIKRGVRLVWNDSKRYKALRKEMAELQRKQAAIRKQQHIDRANALLKEGDTFVVENNPIKGWQARAKETKIDEKTGRFKSKKGRGKSIGNHAPAMFVTILENKVKSLGGEVVKVDTHNAASQYDFTNESFTDHGYDRKITLSNGDTHQRDMLAAFNLQHLKYDETEKKQYDTEAMVQHYDRFCELEQEEILRYKNKEKKDDRSTIGAGDL

SEQ ID NO: 2916 - protein, 483 aa, unidentified
  REGION 1..483: note = Category: MG91 effectors
  REGION 1..483: note = Description: MG91-107 effector
  source 1..483: note = uncultivated organism sequence
MAHKENQKAFVVTFPLRTERWQEDRIDKMMKMLTTYYNDRQKKLVGRYIYLSHSKAFKEAKGKGVVAFKKYMQENGFSKYDLDAFFKANTKGAIYQIGLNSNNIQYLSQCAWSAWERKLFGNGKFIKTDIDVNIFKSRRKNDSFAGFAYDIGSFTITIKSTYARNNICTIPFIVNRKSEYELFAMSQEIRNIAIVRKVIRGVNKYYVQFTVEGAPYNKGRHLGTGTVGIDPGPSKMAIVADKVVEINKLAPNIEEDEKVTARLKRKLDRSRRATNPHMYNEDGTSKKGQRQTIFSKSYDKTRKQLAEAQRKLTAKRKIAHNELANKILEYGDTFKVETNSFKSMQARSKTTSTTKNGRIRSKKRYGKSIKNRAPSEFLLILKNKLLQYSSGKYYDVPASYACTQFDFTDESFTEHKVSERSIITSDGIQHNRDTLAAFNIKNAIVSDTTSKKRKIVKSKEFFDINVMKETYRAFCEMESKLLA

SEQ ID NO: 2917 - protein, 528 aa, unidentified
  REGION 1..528: note = Category: MG91 effectors
  REGION 1..528: note = Description: MG91-108 effector
  source 1..528: note = uncultivated organism sequence
MNEVFVLELPLLVEKYQADILNKRYEQLRQLYNYVQGKLLRQYKYFEQMKEYQACEKIKEKRDFFRTHPFQINETLKGNKIPFKVSFDEYSIKGYIEKLAQKQIGSNMTYADLGFTTNIFDHLGASVWAAWDKKLYDFKAKRISFKKYGDLDSFSSRRKIVRGVVYFSGMELHLDTMELAIKMNGKVGKEAKFITLRMLHNPKHADYEMWALKGGVESVKVVKVVRRMVRSQYKYYVQLTIEGEKPQKGRTLGKGNVGIDLGPTTVAVSGENVVSIDKLASKCDNIQEEITRLSRKIDRSRRANNPQNFNEDGTIKRGIKLVWNDSKRYIELCRELAELRRKQAAIRKQQHIDRANALLKEGDTFIVENNPVNAWVRRAKETKVDEKTGKYKSKRGSGRSVGNHAPAMFVDILENKVKSLGGRFERVNTQNAASQYDFTIDSFKTGDDKHKLNERAITLSNGDTHQRDMLAAFNLQHLKYDEAEAKQYDTEAMAADYERFCQLEQEEIQRYKNKEKKDDRSTIGAEKL

SEQ ID NO: 2918 - protein, 524 aa, unidentified
  REGION 1..524: note = Category: MG91 effectors
  REGION 1..524: note = Description: MG91-109 effector
  source 1..524: note = uncultivated organism sequence
MMKEVFVLELPLLVEKYQADILNKRYEQLRQLYNYVQGKLLRQYRYFEQMVEFQACKTIREKRDFFRSHPFHVNGRLAGDKELPEITFDEYGIKGFVEKLAQKSVGPNMTYADLGFTTYILDHLGANIWSAWDKKLYDYRAKRISFKKFGELDSFSSRRKVVGGKVYFSGMELRLDTMELAIKLNAKQGKNAKFVTLRILHNPKHADYEMWALNGGLDSIKVVKVVRRLVRGQYKYYVQLSIEGEKPQKGRTLGKGNVGIDIGPTTVAVSGENIASIDKLASKCDNIQEEITRLARKIDRSRRANNPENFNEDGTVKRGVRLVWKDSKRYKELRKEMAELQRRQAAIRKQQHIDRANALLKEGDTFIVENNPIKGWAARKKETKIDEKTGKYKSKKGRGKSIKNHAPAMFVTILENKVKSLGGKVERVDTQNAASRFDFTDGSFTDHGYDRKVTLSNGDTHQRDMLAAFNLQHLKYDEAEKKQYDTKAMAQHYDRFCELEQEEIQRYKNKEKKDDRSTIGAGEL

SEQ ID NO: 2919 - protein, 383 aa, unidentified
  REGION 1..383: note = Category: MG91 effectors
  REGION 1..383: note = Description: MG91-110 effector
  source 1..383: note = uncultivated organism sequence
MFLQYLSQCAWSAWDKKLFGKGDFVKTDKVVNIFCSRNKKERFCGFDYDLSTFTISIKSTCTKKIICTIPFVVNKKSDYELFALSQRICRIGIVRKLIRGKYKYYVQFTFDGVPYHKGRNIGTGIVGIDPGPSKIAIVGDNKVEIAKLAPNIEEDERKTARLKRKLDRSRRATNPHMYKEDGTIIKGQRQTCFSKVYNETRKQLADAQRKLAAKRKIAHNELANTLLEYGDTFKVEANSYKSMQARTKATSMTKSGRIRSKKRYGKSIKNRAPSEFLVILKNKLLHYPNGKYYAVPASYACTQFDFTNESFTEHKISERKIVTSDGVQHNRDTLAAFNIKNAIVNETSTKKKKITKSNEFFDIVRMKASYNEFCLMERYLLSI

SEQ ID NO: 2920 - protein, 533 aa, unidentified
  REGION 1..533: note = Category: MG91 effectors
  REGION 1..533: note = Description: MG91-111 effector
  source 1..533: note = uncultivated organism sequence
MKAIEIMKEVFVLELPLQVEKYQADILNKRYEQLRQLYNYVQGKLLRQYRYFEQMLEFQACKTIREKRDFFRSYPFHINGIVGRNKELLDLSFSEYGILGLVTKLGQKPVGSGKTYADVGISSTILANLSNNIWSAWNKKLYDLHAKKISFKKYGELNTFGSGKIVQKKENEVKEFFPGMVLHLERMEIDIKTSKSGKNETYITLPILPNPKHADYEMWALKGGSSSIKVLTIVRRRVRGLYKYYLQMSIEGEKPQKGRTLGKGNVGIDIGPTTVAVSGENIASIDKLASKCDNIQEEITRLARKIDRSRRANNPENFNEDGTIKRGVRLVWKDSKRYKALRKEMAELQRRQAAIRKQQHIDRANALLKEGDTFIVENNQISGWTRKARETKVNEKTGKIQKKKRFGKSVANHAPAMFVTILENKVKSLGGEVVKVDTQNAASQYDFTNNSFEKHELKERSVTLSNGDTHQRDMLAAFNLQHLKYDEAEKKQYDREAMTQHYERFCELEQAEIQRYKNKEKKDDRSTIGAGDL

SEQ ID NO: 2921 - protein, 605 aa, unidentified
  REGION 1..605: note = Category: MG91 effectors
  REGION 1..605: note = Description: MG91-112 effector
  source 1..605: note = uncultivated organism sequence
MIEEFVLTLPLKVETWQADILNNRYEHLRCIYNMVQRKLLRHYIYLSQQNEYRQCKDNDEKRTFWENHPITFKDFCDKNGNPAIVKFPYTYSHRSKDSGKKASNGISDFVPKFKNRNIGGGLTYGSLGINASILENLGLRIEQAWKKRLYDPKSKHISFKEEGDLNTFGCREKDGFSGFVLDLQKMTLSFNTNGRQGKSAKFIHFPINAGKELTEYEMYALKGGIGSIRKIVVSREYVRGRYKYYVQLTIKEEKPQKNRTLGKGTVGLDVGPSTVAVSSLHGVSLDKLADKCDNIEHDLWRINRKMDRSKRDTNPDFFNEDKTYKKPEKGERRKWTFSNRYKRLKLERRELYRKQAAIRKQQHIEMVNALLSQGDEFIVENNPIDSWAKRAKETKRGKNGKIRCKRRFGKSVAHHAPAMFVSILQNKVRSLGGTFHKVEIKNAATQFDFTNGEFTKHELNERTVTLSNGRTHQRDMLSAFNLQHLRPDSEETKDYNIEQMEADYPVFCKLEEKGIAQFKEKRQQERDVAYFTGVSHKTLKFSSANRHNGGVGRKNCNHHAGSKRNVAETGNKSSSKENCESMETVSLVPNEYHHSNHQHLRLDGL

SEQ ID NO: 2922 - protein, 528 aa, unidentified
  REGION 1..528: note = Category: MG91 effectors
  REGION 1..528: note = Description: MG91-113 effector
  source 1..528: note = uncultivated organism sequence
MNEVFVLELPLQVEKYQADILNKRYEQLRQLYNYVQGKLLRQYRYFEQMKEYQACEKFREKKDFFKSHPFHINETLKGNKTPIKVSFDEYSIKGYIEKLAQKPVGPNMTYADIGFTTYILDHLGASIWSAWDKKLYDFKAKRISFKKYGELDSFSSRRKVGRGVIYFSGMELHLDTMELAIKMNGKVGKGAKFITLKILHNPKHADYEMWALKGGLESIKVVKVVRRLVRSQYKYYVQLTIEGEKPQKGRTLGKGHVGIDLGPTTVAISSENVVSIDKLASKCDNIQNEITKLGRKINRSRRASNPQNFNEDGTIKRGIKLVWNDSKRYKELRRELAELHRKQAAIRKLQHIERANALLKEGDTFIVENNPVNAWSRRSNETKVDEKTGKFKSKRGSGRSIGNHAPSMFVDILENKVKSLGGRFERVNTQNAASQYDFTTDSFKTGDEKHKLNERAITLSNGDTHQRDMLAAFNLQHLKLDEEKPKQYDTEAMAADYNRFCQLEHEEIMRYKNKEKKDDNSTIAAGKL

SEQ ID NO: 2923 - protein, 525 aa, unidentified
  REGION 1..525: note = Category: MG91 effectors
  REGION 1..525: note = Description: MG91-114 effector
  source 1..525: note = uncultivated organism sequence
MKEVFVLELPLQVEKYQEDILNKRYEQLRLLYNYVQRKLLRQYRYFEQMDDFQACKTFKEKRDFFKSHPFHINGIIGSNKELLDITFDDYGINGFVTKLGSKSISDENTYSDMGINSAILAKLSDNIWSSWDKMLYDHKAKRISFKRYGDLNSFGCGKKTNGSGKKVFSGLELHLETMTLAIKLNSKVGKSAKFITLPILHNPKHADYEMMALKGGIDSVKVVKVVRRMVRGRYKYYLQMTIEGEKPKKGRLLGKGNVGIDLGPTTVAVSGESIASIDKLASKCDNIQEEITRLARKIDRSRRANNPENYNEDGTIKCGVHLAWNNSKRYKALRREMAELRRKQAAIRKHQHIDRANALLKEGDTFIVENNQISGWTRKAKETKVNEKTGRIQKKKRFGKSVANHAPAMFVTILENKVKSLGGEVVKVDTQNAASQYDFTNDSFEKHELKERNVTLSNGDTHQRDMLAAFNLQHLKYDEAEKKQYDREAMAQHYERFCELEQEEIMRYKNKVKKDDRSTIGTGNL

SEQ ID NO: 2924 - protein, 528 aa, unidentified
  REGION 1..528: note = Category: MG91 effectors
  REGION 1..528: note = Description: MG91-115 effector
  source 1..528: note = uncultivated organism sequence
MNEVFVLELPLQVEKYQADILNKRYEQLRQLYNYVQGKLLRQYRYFEQMKEYQACKTIKEKRDFFKSHPFQVNESLGGDKSAFEISFNEFSIKGFIEKLVQKSVGANMTYADLGFTTNILDHLGASVWAAWDKKLYDFKAKRISFKKYGELDSFSSRRKVVGGKVYFSGMELHLDTMELAIKMNCKQGNNAKFITLKMQHNPKHAEYEMWALKGGVDSVKVVKVVRRLVRSQYKYYVQLTIEGEKPQKGRTLGMGNVGIDLGPTTVAVSGENVVSIDKLASKCDNIQEEITRLSRKIDRSRRANNPQNFNEDGTIKRGIKLVWNDSKRYKELRRELAELRRKQAAIRKQQHIDRANALLKEGDTFIVENNQISSWTTRAKETKVNEKTGKIQKKKRFGKSVANHAPSMFVSILENKVKSLGGEVVKVDTKNAASQYDFTDGSFTKHELKERNVTLSNGDTHQRDMLAAFNLQHLKYDEKDTKQYDTEAMTADYERFCQLEQEEIQRYKNKEKKDDKGTIGAEKYESKV

SEQ ID NO: 2925 - protein, 525 aa, unidentified
  REGION 1..525: note = Category: MG91 effectors
  REGION 1..525: note = Description: MG91-116 effector
  source 1..525: note = uncultivated organism sequence
MENEIFVLEMPLKVEKWQADILNKRYEYLRQIYNYVQGKLLRQFRYFEQMEEYQQCKTFKDKRTFISNHPFHIKGINDKSGNPQPITFTKLSISCFAEKLAKRQIGKDKTYLDVGINTNIIKEQTFNLWKSWEKYLYDYSAHRVAFKKKDELNIFRYGKKGDGFNGMAVNLEKMEVTIKTNGRQGNNATFLTLSVDCGKGMTEYELFALKGDIASINTVAIIRRNIRGQFKYYVQFNIEGEKPQKGRTLGVGKVGIDIGPSTIAVASLNNVSIDKLADRCDDIQHDLNIVSRKIDRSRRANNPQNFNADGTIKRISRQKGERRVWNDSNRYKKLKAERAELLRKQAAIRKNQHILKANELLEMGDTFIVENNPVDGWTRRTKETKFDKRGKIQSKKRYGKSVANHAPSMFVTILENKVKSFGGTFVRADVKNAASQFDFTSGEFTKHEVGERTVTLANGDKHQRDMMAAFNLQHLNIESEELKDYDIEQMKSDYPNFCSQEREELNRYIRKEKKDERTTIGAFRK

SEQ ID NO: 2926 - protein, 606 aa, unidentified
  REGION 1..606: note = Category: MG91 effectors
  REGION 1..606: note = Description: MG91-117 effector
  source 1..606: note = uncultivated organism sequence
MAKETFVLTLPLKVEKWQADILDKRYELLRQIYNMVQQKLLRQYIYFSQQKAFKACKGDFQKMREFFASHPFHFKGIKGRNGEPSDIKFPYTYESRSSSSGRRAPNGISDFVSKLGAHKIGKDKTLSDFGINSCILEELGLHVMQAWEKRIYESKSSRVSFKKYGDINSFGSRCKNGSFAGFTFNLEKSHITFNTNGRQRKCAKLITLPIDFSREKKGYAASALKGGIDSLRKLIIVRKCIRGKNKYYLQLTIGGEKPQKGRTLGHGNVGIDVGPSTIAVSSLQCVHFNKLADKCDNIEHDLFLVNRKLDRSRRANNPQNYNADGTVKRGVRLVWKKDKDVKRYASLKLHRKELYRKQAEIRKQQHLQMANAILSEGDTFIVENNPIDAWVRRAKETTKTKTGKNRCKKRYGKSVANHAPAMFVSILKNKVQSLGGVFHEVDVRYAATQFDFTNGTKTKHEVSERSITLSNGHTHQRDMLSAFNLQHIKLECIGTEDKDYDIKQMQADYPIFCKLEAAEQERFKVARHNERDALYFVGASEKQLRHQPQDESVANRHNGGVGRKHCNTRLGSENAEITGSGLIRESIERVPQVSDEYHISGHPPIV

SEQ ID NO: 2927 - protein, 609 aa, unidentified
  REGION 1..609: note = Category: MG91 effectors
  REGION 1..609: note = Description: MG91-118 effector
  source 1..609: note = uncultivated organism sequence
MAKETFVLSLPLIVEKWQADILDKRYELLRQTYNMVQQKLLRQYIYFAQQKTFKACENFQQKRDFFASHPFHFKGIKGRNGELSDIKFPYTYESRSSSSGKRPSGGISDYVSKLWAHRISQDKTLADFGINGSILEELGLHIMKAWETRLYEPKASRVSFKDYGTVNSFGCRYHKGNFAGFTINLEEGYITYNTNGRRGSLANIIKLPIDYSREKKGYASEALKGGVDSLRKLVIVRKIIRGRNKYYLQLTISGEKPQKGRILGHGNVGIDIGPSTIATSSLQGVHFDKLADKCDNIEHELYLVNRKLDRSRRANNPQNYNEDGTIKRGIRLVWKKDKDAKRYASLKLLRKELYRRQAEIRKLQHLEMANAMLSQGDTFIVENNPIDAWVRRTKETAKTKTGRNRCKKRYGKSVANHAPAMFVSILKNKVLSLGGQFHEVDVRYAATQFDFTNGVKTKHEVGERSITLSNGRTHQRDMLSAFNLQHITLESIGTEDKDYNIEQMYADYPIFCKLESAEQERFKVARKNERDALYFVGVSEKNLRHQHHKETVVNRHNGDVGRKHCNNSLEKENAKITGNGLIRESIERVSEVPDKYHLVGNHPIVLDGL

SEQ ID NO: 2928 - protein, 550 aa, unidentified
  REGION 1..550: note = Category: MG91 effectors
  REGION 1..550: note = Description: MG91-119 effector
  source 1..550: note = uncultivated organism sequence
MTRTRTTLDNSYVALITPKDEGYLKKMNEVFVLELPLQVEKYQADILNKRYEQLRQLHNYVQDKLLRQYRYFEQMKEYQACEKIKEKREFFRAHPFQINETLKGNKTSFKVSFDEYRIKGYIEKLAQKQVGLNTTYADLGFTTYILDHLGASVWAAWDKKLYDFKAKRISFKKFGELDSFSSRRKVVGGKVYFSGMELHLDTMELAIKMNGKVGKEAKFITLKMLHNPKHADYEMWALKDGVDSVKVVKVVRRLVRSQYKYYVQLTIEGEKPQKGRTLGKGHVGIDLGPTTVAVSGENIVSIDKLASKCDNIQEEITRLSRKIDRSRRANNPQNFNEDGTIKRGIKLVWNDSKRYKELRRELAELRRKQAAIRKQQHIERANALLKEGDTFIVENNQISGWTTRAKETKVNEKTGKIQKKKRFGKSVANHAPSMFVSILENKVKSLGGEVVKVDTKNAASQYDFTDGSFTKHELKERNVTLSNGDTHQRDMLAAFNLQHLKYNEAEAKQYDTEAMAADYERFCQLEQEEIQRYKNKEKKDDKGTIGAEKF

SEQ ID NO: 2929 - protein, 524 aa, unidentified
  REGION 1..524: note = Category: MG91 effectors
  REGION 1..524: note = Description: MG91-120 effector
  source 1..524: note = uncultivated organism sequence
MNEVFVLELPLQVEKYQADILNKRYEQLRQLYNYVQGKLLRQYRYFEQMKEYQACKTIREKRDFFRSHPFLINETLKGNKTPFTVSFDEYSIKGFVEKLAQKPVGPNMTYADLGFTTPILDHLGASIWAAWDKKLYDFKAKRISFKKYGELDSFSSRRKVVRGVVYFSGMELHLDTMELAIKMNGKVGKEAKFISLKMLHNPKHADYEMWALKGGVDSVKVVKVVRRLLRNQYKYYVQLTIEGEKPQKGRTLGKGNVGIDLGPTTVAVSGKNVVSIDKLASKVDNFQEEITRLSRKIDRSRRANNPQNFNEDGTIKRGIKLVWNDSKRYKELRRELAGLRRKQAAIRKQQHIERANALLKEGDTFIVENNQISGWTTRAKETKVNEKTGKIQKKKRFGKSVANHAPSMFVSILENKVKSLGGDLVKVDTKNAASQYVFTDNSFSKHELKERNVTLSNGDTHQRDMLAAFNLQHLKYDEKDTKQYDTAAMTADYERFCQLEQEEIQRYKNKEKKDDRSTIGAEDL

SEQ ID NO: 2930 - protein, 529 aa, unidentified
  REGION 1..529: note = Category: MG91 effectors
  REGION 1..529: note = Description: MG91-121 effector
  source 1..529: note = uncultivated organism sequence
MNEVFVLELPLQVEKYQADILNKRYEQLRQLYNYVQGKLLRQYKYFEQMKEFQACKTFKEKKDFFRSHPFHIDGILGSNKELYDITFDEYGINGFVGKLGKKQVSAGVTYADLGITSTLLDRLSLAVWAAWDKMLYDYHSRRVSFKKNGELNIFGSRKKTNGSGKKMFSGMELHLEKMEVAIKLNGKVGKAAKFITLPILHNPKHIDYEMWALKGGFDSVTVLTIVRRMVRSQYKYYVQLTVEGEKPQKGRTLGKGNVGIDLGPTTVAVSGEHIVSIDKLASKCDNIQEEITRLSRKIDRSRRANNPQNFNEDGTIKRGIKLIWNHSKRYKELRRELAELRRKQAAIRKLQHIDRANALLKEGDTFIVENNQISGWTTRAKETKVSEKTGKIQKKKRFGKSVANHAPSMFVSILENKVKSLGGEVVKVDTKNAASQYDFTNNSFKKHELKERNVTLSNGNTHQRDMLAAFNLQHLKYNEPEAKQYDTEAMAADYKRFCQLEQEEIQRYKNKEKKDDRSTIGAEELNIKE

SEQ ID NO: 2931 - protein, 528 aa, unidentified
  REGION 1..528: note = Category: MG91 effectors
  REGION 1..528: note = Description: MG91-122 effector
  source 1..528: note = uncultivated organism sequence
MNEVFVLELPLQVEKYQADILNKRYEQLRQLYNYVQGKLLRQYKYFEQMKEYQSCRTFKEKKDFFRNHPFQIKGVLGRNKELLDIFFDEYGIFGLVTKLGQKPMGSGMSYTDMGISSTILANLSYNIWSSWNKKLYDYHADRISFKKHDGLNTFGSGKIVKKKDNEVKEYFPGMVLHLDRMEIDIKTNGGLGKKTTFITLPILYNPKHADYEMMALKGGTKSIKVLTVVRRLVRGQYKYYLQLTIEGEKPQKGRTLGKGNVGIDLGPTTVAISGKNVVSIDKLVSKCDNIQEEITRLSRKIDRSRRANNPQNYNEDGTIKRGIKLVWNDSKRYKELRRELAELRRKQAAIRKQQHIDRANALLKEGDTFIVENNQISGWATRAKETKVNEKTGKIQKKKRFGKSVANHAPSMFINILENKVKSLGGEVVKVDTKNAASQYDFTDGSFTKHELKERNVTLSNGDTHQRDMLAAFNLQHLKYDEAEAKQYDTEAMAADYERFCQLEQEEIQRYKNKEKKDDRGTIGAEKL

SEQ ID NO: 2932 - protein, 484 aa, unidentified
  REGION 1..484: note = Category: MG91 effectors
  REGION 1..484: note = Description: MG91-123 effector
  source 1..484: note = uncultivated organism sequence
MAHKENQKAFVVTFPLRTEKWQEDRIDKMMRMLTTFYNDRQRKLVRRYIYLSHSKAYKEAKGKGVVAFKNYMKENGFSQYGLDAFFKADTKGALYQCGLNSMFLQYLSQCAWSAWDKKLFGKGDFVKTDKVVNIFCSRNKKERFCGFDYDLSTFTISIKSTCTKKIICTIPFVVNKKSDYELFALSQRICRIGIVRKLIRGKYKYYVQFTFDGVPYHKGRNIGTGIVGIDPGPSKIAIVGDNKVEIAKLAPNIEEDERKTARLKRKLDRSRRATNPHMYKEDGTIIKGQRQTCFSKVYNETRKQLADAQRKLAAKRKIAHNELANTLLEYGDTFKVEANSYKSMQARAKATSMTKSGRIRSKKRYGKSIKNRAPSEFLVILKNKLLYYPKGKYYDVPSSYACTQFDFTNESFTEHKISERRIVTSDGIQHNRDTLAAFNIKNAIVNDTSTKKKKVTKSKEFFDIVRMKASYNEFCLMERYLLSV

SEQ ID NO: 2933 - protein, 524 aa, unidentified
  REGION 1..524: note = Category: MG91 effectors
  REGION 1..524: note = Description: MG91-124 effector
  source 1..524: note = uncultivated organism sequence
MKEVFVLDLPLRVEKYQSDILNKRFEQLRQLYNYVQGKLLRQYRYFEQMKEYQACKTFKEKKDFFRKHPFHINGILGSNKELLDITFDEYGIKGFVEKLVQKGVGTDMTYADLGFTTYILDHLSAGIWSAWDKMLYDYKARRISFKKYGELDSFSSRRKVVQGKVYFSGMELHLDSMMLSVKMNGKVGKAAKFITLPILHNPKHANYEMWALRGGLDSVKVVKVVRRLIRGQYKYYVQMTIEGEKPQKGRTLGKGNVGIDLGPTTVAVSSENIVSIDKLASKCDSIEAEKAKLGRKIDRSRRANNPQNFNEDGTIKRGVRLVWNDSKRYKALRGEMAELQRRQSAIRKQQHIDRANELLKEGDIFIVENNQISGWTRKTKETRVDESTGRIRKKKRFGKSVANHAPSMFVNILENKVKSLGGQLVKVDTQNAASQYDFTDGSFTKHELQERNVTLSNGDTHQRDMLAAFNLQHLKYDEAEKKQYDREAMSKHYERFCELEQAEILRYKNKEKVDDRSTIGAKEL

SEQ ID NO: 2934 - protein, 527 aa, unidentified
  REGION 1..527: note = Category: MG91 effectors
  REGION 1..527: note = Description: MG91-125 effector
  source 1..527: note = uncultivated organism sequence
MEEVFVLELPLQVEKYQADILNKRYEQLRQLYNYVQGKLLRQYKYFEQMKEYEVCKSIREKRDFFRNHPFHITGVLDKSGEPLDITFDEYGIQGFVEKIIHKSVGANTTYADLGFNTLILDYLSASIWSAWDKKLYDFKAKRISFKKYGELDSFSSRRKVVRGVVYFSGMELHLDTMELAIKMNGKVGKEAKFITLKMLHNPKHADYEMWALKGGVDSVKVVKVVRRLVRSQYKYYVQLTIEGEKPQKGRTLGKGNVGIDLGPTTVAISGKNVVSIDKLASKCDNIQEEITRLSRKIDRSRRANNPQNFNEDGTIKRGVKLVWNDSKRYKELRRELAELRRKQAAIRKQQHIDRANALLKEGDTFIVENNQISGWTTRAKETKVNEKTGKIQKKKRFGKSVANHAPSMFVSILENKVKSLGGEVVKVDTKNAASQYDFTDGSFTKHELKERNVTLSNGNTHQRDMLAAFNLQHLKYDEAEAKQYDTDAMAADYERFCQLEQEEIQRYKNKEKKDDRGTIGVEQLLKT

SEQ ID NO: 2935 - protein, 603 aa, unidentified
  REGION 1..603: note = Category: MG91 effectors
  REGION 1..603: note = Description: MG91-126 effector
  source 1..603: note = uncultivated organism sequence
MAKENFVLTLPLRVEKRHADILDKRYELLRQMYNMVQQKLVRQYIYFSQQKAYKACENFEQKREFFNTHPFHFKGIKGKNGELCDIKFPYTYESRSSSSGKRPSGGISDYVSKLWSHKVGADKKLVDFGLNGSIMEELGLHVMKAWEDRLYKFKARRVSFKDYGEINSFGCRYHKGNFAGFTINLEEGFITFNANGRRGQFAEIITLPIDFSREKKGYAEEALKGGVDSLRKLIIVRRCIRGRNKYYLQLTISGEKPKKGRTLGMGNVGIDVGPSTIAISSLQGVHFDKLADKCDNIEHKLYLINRKLDRSRRANNPDNYNPDGTIKRGVRLVWKKDKDVKRYASLKQQRKELFRKQAEIRKQQHLEMANAMLSQGDTFIVENNPIDAWVRRAKETKKTKTGKNRCKKRYGKSVANHAPAMFVSILKNKVLSLGGEFREVNPGYAATQFDFTNGVFTKHEVSERSITLSNGRTHQRDMLSAFNLQHICNELKEYNITQMQADYPIFCRLETAEQERFKEARRNERDALYFVGAFAKELRHSPQEETVANRHNGGVGRKHSNTLCTENAKITGSGLVRESIERVSEAPEECYHFDCQPIILDGL

SEQ ID NO: 2936 - protein, 528 aa, unidentified
  REGION 1..528: note = Category: MG91 effectors
  REGION 1..528: note = Description: MG91-127 effector
  source 1..528: note = uncultivated organism sequence
MKEIFVLELPLQVEKYQADILNKRYEQLRQLYNYVQGKLLRQYRYFEQMKEFQICKTIKERKDFFRSHPFHINGVLNSNKELLDITFDEYGINGFVSKLGKKQVCTDTTYADLGITSTLLDRLSLAVWAAWDKMLYDYHAKRISFKKYGELNVFGSRKKTNGSGKKVFSGMELHLEKMEVAIKLNGKVGKAAKFITLPILHNPKHAEYEMWALKDGYDSVTVLTIVRRMVRRHYKYYVQLTIEGEKPQKGRTLGKGNVGIDLGPTTVAVSGKNIVSIDKLASKCDNIQAEITRLSRKIDRSRRANNPQNFNEDGTIKRGVKLVWKKEKDLKRYSKLKRELAELRRKQAAIRKQQHIERANELLKEGDTFIVENNPVKAWVRRAKETKVDEKTGKIRSKRGSGRSVGNHAPAMFVDILENKVKSLGGRFERVETQNAASRFDFTNESFTEHDRSVRAITLSNGDTHQRDMLAAFNLQHLKLEDTKTKQYDIEAMAADYDRFCQLEREEIMRYKNKKKKDDRSTIGAEKL

SEQ ID NO: 2937 - protein, 516 aa, unidentified
  REGION 1..516: note = Category: MG91 effectors
  REGION 1..516: note = Description: MG91-128 effector
  source 1..516: note = uncultivated organism sequence
MEKKKEMFVVELPLKVEKWQSDVLNKRYELITKIYNYAQKKLLRQYIYLTQMDDYKKCKTKKDKSVFFKNHPFYFKGITSKITFSEYDVTAFFEKIIKKNVSSDKTYKDFGINTSITGYLGKHAWSAWEKKIYGTGKKISFKNKGELSTISIRKKSEYFGGLDVDIEHMILSFNINGKTKSKAKKIILPINTKNLTEYEMYALKGGYDSIKVVTIVSKMIRGKYKYYVQFTIEGEKPQKGRTLGKGNVGIDIGPSTVAISSLNGVTIDTLAEKCDNIEDKISDIERKLDRSRRATNPQNFTEDGQIKRIDRKKGEKRKWEYSKRYVKLNNKKRELLRKQAAIRKLQHNIKANEVLSLGDTFIVENNPTSAWAKRAKGVRKNKNGKIQTNKRFGKSIGNHAPAMFVTILQNKVESLKGKFVKVDIKNAASRFDFTNGDFTEHNLDERKITLSNGNTHQRDMLAAFNLQHIDLTNDDLKKYNVEEMMEDYPIFCKLEKEEIKRFTNGMKIPNKSNIGI

SEQ ID NO: 2938 - protein, 527 aa, unidentified
  REGION 1..527: note = Category: MG91 effectors
  REGION 1..527: note = Description: MG91-129 effector
  source 1..527: note = uncultivated organism sequence
MTEVFVLELPLQIEKYQADLLNKRYEQLRQLYNYVQGKLLRQYRYFEQMKEYQACKTIKEKRDFFRSHPFQINETLKGNKTLFTVSFEEYSIKGFVEKLAQKPVGSNMTYADLGFTTYILDHLGASIWAAWDKKLYDFKAKRISFKKYGELDSFSSRRKVVRGVVYFSGMELHLDTMELAIKMNGKVGKEAKFITLKILHNPKHAEYEMWALKGGVDSVKVVKVVRRLVRSQYKYYVQLTIEGEKPQKGRTLGKGNVGIDLGPTTVAVSGMNIVSIDKLASKCDNIQPKITRLSRKLDRSRRANNPDNYNEDGTIKRGVKLVWKKEKDLKRYSKLKRELAELRRKQAAIRKQQHIDRANELLKEGDTFIVENNQISGWTTRAKETKVNEKTGKIQKKKRFGKSVANHAPSMFVSILENKVKSLGGEVVKVDTKNAASQYDFTNNSFTKHELKERNVTLSNGDTHQRDMLAAFNLQHLKLDEAKTKQYDTEAMAADYVRFCQLEQKEIQRYKNKEKKDDRGTIGAEKL

SEQ ID NO: 2939 - protein, 524 aa, unidentified
  REGION 1..524: note = Category: MG91 effectors
  REGION 1..524: note = Description: MG91-130 effector
  source 1..524: note = uncultivated organism sequence
MNEVFVLELPLQVEKYQADILNKRFEQLRQLYNYAQGKLLRQYRYFEQMKEYQACKTFKDKKDFFKNHPFQIHGIQGSNKQPLDITFDEYGINGFVEKLVQKSAGPNVTYADLGFTTNILDHLSASIWRAWDKMLYDYHAKRVSFKKYGELDSFSSRRKVVSGKVYFSGMELHIDTMELSVKLNGKQGANAKFITMPIQYNPKHEDYELWALKGGLTSVKVVKVVRRLVRSQYKYYVQLTIEGEKPKKGRTLGKGNVGIDIGPTTVAVSGENIASIDKLASKCDNIQAEITRLGRKIDRSRRANNPQNFNEDGTIKRGVRLVWNDSKRYKALKREMVELQRRQAAIRKQQHIDRANALLKEGDTFIVENNQISGWTKRAKETKINEKTGKIQKKKRFGKSIANHAPSMFVTILENKVNSLGGKVVKVDTQNAASQYDFTDGSFEKHELNERSVTLSNGDTHQRDMLAAFNLQHLKYDEKEKKQYDVEAMKKHYERFCELEQDEIMRYKNKEKKDDRSTIGAEKF

SEQ ID NO: 2940 - protein, 609 aa, unidentified
  REGION 1..609: note = Category: MG91 effectors
  REGION 1..609: note = Description: MG91-131 effector
  source 1..609: note = uncultivated organism sequence
MAKENFVLTLPLKVEKCHADILDKRYELLRQTYNMVQRKLLRQYIYFAQQKEYKACENFQQRRDFFASHPFHFKGINSKNGEPADIKFPFTYESRSSNSGKRPSGGISDYVSKLWAHRVGADKTLANLGINSYILEELGLHIMKAWEKRLYDPKSSRVSFKDYGGVNSFGSRYKKGNFAGFTINLEEGFITYNANGRQGRFADLIKLPIDFSREKKDYAAYALKGGIDSLRKLIILRKNIRGRNKYYLQLTISGEKPQKGRALGQGNVGIDIGPSTIATSSLQGVHFDKLADKCDDIEHELYLINRKMARSRYENNRQNYNADKTIKRGVRLVWKKDKDVKRYASLKLKRRELYRRQAEIRKLQHLEMANAMLSQGDTFIVENNPIDAWVRRAKETTKTKTGRNRCKKRYGKSVANHAPAMFVTILKNKVESLGGKFYEVDVRYAATQFDFTNGVKTKHEVSERSITLSNGHIHQRDMLSAFNLQHIKLESIGTDDKEYNIEQMKADYPIFCQLETAEQQRFKEARHNERDAQYFVGAQEKQLRHQPQDESVANRHNGGVGRKHCNTRLEGENAKITGSGLVRESIERVSQVPDEYHPIGDQPIILDGL

SEQ ID NO: 2941 - protein, 615 aa, unidentified
  REGION 1..615: note = Category: MG91 effectors
  REGION 1..615: note = Description: MG91-132 effector
  source 1..615: note = uncultivated organism sequence
MAKENFVLTLPLRVNKCQADILDKRYELLRQMYNMVQQKLVRQYIYFSQQKAYKACENFEQKREFFNAHPFHFKGIKGKNGELCDIKFPYTYESRSSSSGKRAPSGISDYVSKLGSHKIGQDKTLADFGINSYIMEELGLHIMKAWEDRLYKFKSKRVSFKDYGEINSFGSRYKNGNFAGFTINLKEGFITYNTNGRRGQYADLITLPIDFSREKRGYAAEALKGGVDSLRKLVIVRRCIRGRNKYYLQLTISGEKPQKGRTLGKGNVGIDIGPSTIATSSLYGVHFDELADKCDNIEHELYLLNRKLDRSRRANNPDNYNPDGTIKRGVRLVWKKDKDVKRYASLKQLRKELFRKQAETRKQQHLEMANAMLSQGDTFIVENNPIDAWVRRAKETTKTKTGKNRSKKRYGKSVANHAPAMFVTILENKVKSLGGQFHRIDPGYAATQFDFTNGVFTKHEVSKRSITLSNGRTHQRDMLSAFNLQHARLEAEKAKSRDKEKKVESYDIVQMQADYPIFCRLETAEQERFKDARRNERDALYFVGAFAKKLRHEPQEETVANRHNGGVGRKHCNTLCTENAKITGSGLVRESIERVSEAPEECYHAGDQSIILDGL

SEQ ID NO: 2942 - protein, 524 aa, unidentified
  REGION 1..524: note = Category: MG91 effectors
  REGION 1..524: note = Description: MG91-133 effector
  source 1..524: note = uncultivated organism sequence
MKEVFVLDLPLRVEKYQSDILNKRFEQLRQLYNYVQGKLLRQYRYFEQMKEYQACKTFKEKKDFFRNHPFHINGILGSNKELLDITFDEYGIKGFVEKLVQKGVGTDMTYADLGFTTLILDHLSAGIWSAWDKMLYDYKARRISFKKYGELDSFSSRRKVVQGKVYFSGMELHLDSMMLSVKMNGKVGKAAKFITLPILHNPKHADYEMWALKGGLDSIKVVKVVRRMVRGRYKYYLQMSIEGEKPLKGRKLGKGNVGIDLGPTTVAVSGENIASIDKLASKCDSIETEKAKLGRKIDRSRRANNPQNFNEDGTIKRGIRLEWNDSKRYKELRVEMAELQRRQAAIRKQQHIDRANELLKEGDTFIVENNQISGWTRKAKETKVNENTGKIRKKKRFGKSVANHAPAMFMTILENKVKSLGGKVVKVDTQNAASQYDFTNNSFTKHELNERSVTLSNGDTHQRDMLAAFNLQHLKYDEQEKKQYDTEAMTKHYERFCELEQAEILRYKNKEKVDDHSTIGAKEL

SEQ ID NO: 2943 - protein, 612 aa, unidentified
  REGION 1..612: note = Category: MG91 effectors
  REGION 1..612: note = Description: MG91-134 effector
  source 1..612: note = uncultivated organism sequence
MTENFVLTLPLKVEKWQADILDRRYELLRQTYNMVQRKLVRQYIYFSQQKAYKACKGDFSQLREFFASHPFHFKGITSKNGELSDIKFPYTYESRSSGSGKRAPNSISDYVSKLWTHRIGQDKTLADLGINGSILEELGLHIMSAWGKRLYDPKASRISFKDYGDVNSFGSRYHKGNFAGFTINLEEGFITYNANGRRGRYADIIKLPIDFSREKNDYAAYALKGGIESFRKLLIVRRCIRGRNKYYLQLNINGEKPQKGRTLGKGNVGIDIGPSTIATSSLQGVHFDKLADKCDNLEHELYLINRKLDRSRRANNPHNYNEDGTIKRGVRLMWKQDKDVKRYASLKQKRRELYRRQAEIRKLQHLEMANAMLSQGDTFIVENNPIDAWVRRAKETTKTKTGRNRCKKRYGKSVANHAPAMFVTILKNKVQSLGGQFLEVDVRYAATQFDFTNGIKTKHEVSERSITLSNGNTHQRDMLSAFNLQHIRQESIGTEDKDYDIEQMQADYPIFCKLETAEQERFKVARHKERDALYFLGASKKQLRRQPQDESVANRHNGGVGRKHCNTRLGSNNQENAKIRGSGHVRESIERVSQVPDGYHLVGNHPIILDGL

SEQ ID NO: 2944 - protein, 525 aa, unidentified
  REGION 1..525: note = Category: MG91 effectors
  REGION 1..525: note = Description: MG91-135 effector
  source 1..525: note = uncultivated organism sequence
MNEVFVLELPLQVEKYQADLLNKRYEQLRQLYNYVQGKLLRQYRYFEQMKEFQACKTFKEKKDFFRRHPFHIDGILGSNKELYDITFDEYGINGFVGKLGKKQVSAGVTYADLGITSTLLDRLSLAVWAAWDKMLYDYHAQRVSFRKYGELNIFGSRKKTNGSGKKVFSGMELHLEKMEVAIKLNGKVGKAAKFITLPILHNPKHIDYEMWALKGGFDSVTVLTIVRRLVRSQYKYYVQLTIEGEKPQKGRKLGKGNVGIDLGPTTVAVSGVNVVSIDKLASKCDDIQEEITRLSRRIDRSRRANNPQNFNEDGTIKRGIKLVWNDSNRYKELRRELAELRRKQAAIRKQQHIERANALLKEGDTFIVENNPISSWTTRAKETKVNEKTGKIQKKKRFGKSVANHAPSMFVSILENKVKSLGGDLVKVDTKNAASQYDFTNNSFTKHELKERNVTLSNGDTHQRDMLAAFNLQHLQYDEKDDKQYDTEAMTADYERFCQLEQEEILRYKNKVKKDDRSTIGAEKL

SEQ ID NO: 2945 - protein, 527 aa, unidentified
  REGION 1..527: note = Category: MG91 effectors
  REGION 1..527: note = Description: MG91-136 effector
  source 1..527: note = uncultivated organism sequence
MPTENFVLELPLRVEKYQADILDKRYEQLRQLYNYVQGKLLRQYRYFEQMKAYQDCNSIKEKREFFSSHPFHINGIYGRNKDLLDITFSKFGIFGLVTKLGQKSVGSGYTYTDCGISSTILAHMSANIWSAWNKMLNDYHTKRISFKRHGELNSFGSGKIDNEYFPGLVLRLEKMELDIKLNGKTGKNAKFITLSILHNPKHADYEMMALKGGFDSVKVITVVRRMVRGRYKYYLQMSIEGEKPKKGRTLGKGTVGIDLGPSTIAVSGNNIASIDKLASKCDNIEKKIQKLNRKIDRSRRANNPDNYNEDGTYKRGVRLSRNESNRYKALRKEKAELQRRQAAIRKLQHIERANELLKEGDTFVVENNQFKGMAKRSKETKVDEKTGKMRSKKRSGKSIANHAPAMFVTILKNKVESLGGRFEIVNTNNAASQYDFTDGSFTKHELSERNITLSNGDTHQRDMLAAFNLEHLKYEAKDPKKYDSEAMHEHYERFCQLEREEIERYKNKEKKDDRSTISASTIVYDKK

SEQ ID NO: 2946 - protein, 528 aa, unidentified
  REGION 1..528: note = Category: MG91 effectors
  REGION 1..528: note = Description: MG91-138 effector
  source 1..528: note = uncultivated organism sequence
MEEVFVLELPLQVEKYQADILNKRYEQLRQLYNYVQGKLLRQYRYFEQMKEFQVCKTFKEKRDFFRSHPFHINGIYGNDKELLDITFDEYGINGFVGKMGKKLVNANTTYADLGITSTLLDRLSLAVWAAWDKMLYDYRARRVSFKKHGELNIFGSRKKTNGSGKKMFSGMELHLEKMEVSIKLNGKVGKKAKFITLPILHNPKHADYEMWALKGGFDSVKVITVVRRLVRGQYKYYLQLSIEGEKPQKGRTLGKGNVGIDIGPTTVAVSGENIASIDKLASKCDNIQKEITRLARKIDRSRRANNPQNFNEDGTIKRGVRLVWKKDKDCKRYAALKREMAELQRRQAAIRKQQHIDRANALLKEGDAFIVENNQISGWVRKAKETKVNEKTGKIQKKKRFGKSVANHAPAMFVTILENKVKSLGGEVVKVDTQNAASQYDFTNNSFEKHELKERSVTLSNGDTHQRDMLAAFNLQHLKYDDAEKKQYDTEAMAQHYDRFCELEQAEIQRYKNKEKKDDRSTIGAGDL

SEQ ID NO: 2947 - protein, 512 aa, unidentified
  REGION 1..512: note = Category: MG91 effectors
  REGION 1..512: note = Description: MG91-139 effector
  source 1..512: note = uncultivated organism sequence
MNEVFVLELPLQVEKYQADILNKRYEQLRQLYNYVQGKLLRQYRYFEQMKEYQACKTIKEKRDFFKSHPFQVNESLGGDKSAFEISFNEFSIKGFIEKLVQKSVGANMTYADLGFTTNILDHLGASVWAAWDKKLYDFKAKRISFKKYGELDSFSSRRKVVGGKVYFSGMELHLDTMELAIKMNGKQGNNAKFITLKMQHNPKHAEYEMWALKGGVDSVKVVKVVRRLVRSQYKYYVQLTIEGEKPQKGRTLGMGNVGIDLGPTTVAVSGENVVSIDKLASKCDNIQEEITRLSRKIDRSRRANNPQNFNEDGTIKRGIKLVWNDSKRYKELRRELAELRRKQAAIRKQQHIDRANALLKEGDTFIVENNQISSWTTRAKETKVNEKTGKIQKKKRFGKSVANHAPSMFVSILENKVKSLGGEVVKVDTKNAASQYDFTDGSFTKHELKERNVTLSNGDTHQRDMLAAFNLQHLKYDEKDTKQYDTEAMTADYERFCQFEQEEILLYNNKLN

SEQ ID NO: 2948 - protein, 514 aa, unidentified
  REGION 1..514: note = Category: MG91 effectors
  REGION 1..514: note = Description: MG91-140 effector
  source 1..514: note = uncultivated organism sequence
MIVEKYQADILNKRFEQLRQLYNYAQGKLLRQYRYFEQMKEFQACTTFREKKDFLRSHPFHVNGILDRSGDVLNITFDEYGIKGFLEKLIHKPVGSNMTYADLGITTYILDHLSAGIWRAWDKMLYDYHAKRVSFKKYGELDSFSSRRKTSGNKVYFAGMELHLDTMELSVKLNGKQGKDAKFVTMPILHNPKHADYEMWALKGGEDSVKVVKVVRRLVRGQYKYYVQLSIEGEKPQKGRTLGKGTVGIDLGPTTVAVSGENVVSIDKLAAKCDNIQSEITRLARKIDRSRRANNPQNFNEDGTIKRGVRLVWNDSKRYKALRREMAELQRRQAAIRKQQHIDRANELLKEGDTFIVENNQISAWTRKAKETKVNEKTGKIQKKKRFGKSIANHAPSMFVTILENKVNSLGGKVVKVDTQNAASQFDFTDGSFEKHELKERSVTLSNGDTHQRDMLAAFNLQHLKYDDAKKKQYDTDAMGQHYERFCELEREEIERYKKKEKKDDRGTIGAKGL

SEQ ID NO: 2949 - protein, 521 aa, unidentified
  REGION 1..521: note = Category: MG91 effectors
  REGION 1..521: note = Description: MG91-141 effector
  source 1..521: note = uncultivated organism sequence
MKEVFVLELPLQVEKYQADILNKRYEQLRQLYNYVQGKLLRQYKYFDQMAEFQACKTINEKRIFFRNHPFHIKGILGGDKEPLNITFDEYGINAFVEKLVQKSAGPNMTYADLGFTTYVFDHLSSGIWRAWEKMLYDYRAKRISFKKYGELNSFSSRRKVVRGKIYFSGMELNLERMELSIKLNGKVGKSSKFTTLPILHNPKHADYEMWALKGGLDSVKVLKVVRRLVRGLYKYYLQMSIEGEKPQKGRTLGKGNVGIDLGPTTIAISGQDIVCIDKLAPKCDNIQKEITRLARKIDRSRRANNPQNFNEDGTIKRGARLVWSDSKRYRELRREKAELQRKQAVIRKQQHIDRANALLEEGETFIVENNPISAWTRRAKETKVNEKTGRIQKKKRFGKSVANHAPSMFVSILENKVKSLGGQLIKADPKNAASQFDFTDGSFEKHELNERSVTLSNGDTHQRDMLAAFNLQHLKGDKQYDTEAMERHYERFCELEKKEIMRYKNKEKKDDRSTIAASDFL

SEQ ID NO: 2950 - protein, 524 aa, unidentified
  REGION 1..524: note = Category: MG91 effectors
  REGION 1..524: note = Description: MG91-142 effector
  source 1..524: note = uncultivated organism sequence
MNEVFVLELPLQVEKYQADILNKRYEQLRQLYNYVQGKLLRQYRYFEQMKEYQACKTIKEKRDFFKSHPFQVNESLGGDKSAFEISFNEFSIKGFIEKLVQKSVGANMTYADLGFTTNILDHLGASVWAAWDKKLYDFKAKRISFKKYGELDSFSSRRKVVGGKVYFSGMELHLDTMELAIKMNCKQGNNAKFITLKMQHNPKHAEYEMWALKGGVDSVKVVKVVRRLVRSQYKYYVQLTIEGEKPQKGRTLGMGNVGIDLGPTTVAVSGENVVSIDKLASKCDNIQEEITRLSRKIDRSRRANNPQNFNEDGTIKRGIKLVWNDSKRYKELRRELAELRRKQAAIRKQQHIDRANALLKEGDTFIVENNQISSWTTRAKETKVNEKTGKIQKKKRFGKSVANHAPSMFVSILENKVKSLGGEVVKVDTKNAASQYDFTDGSFTKHELKERNVTLSNGDTHQRDMLAAFNLQHLKYDEKDTKQYDTEAMTADYERFCQLEQEEIQRYKNKEKKDDKGTIGAEKL

SEQ ID NO: 2951 - protein, 603 aa, unidentified
  REGION 1..603: note = Category: MG91 effectors
  REGION 1..603: note = Description: MG91-143 effector
  source 1..603: note = uncultivated organism sequence
MAKENFVLTLPLRVEKRHADILDKRYELLRQMYNMVQQKLVRQYIYFSQQKAYKACENFEQKREFFNTHPFHFKGIKGKNGELCDIKFPYTYESRSSSSGKRPSGGISDYVSKLWSHKVGADKKLVDFGLNGSIMEELGLHVMKAWEDRLYKFKARRVSFEDYGEINSFGCRYHKGNFAGFTINLEEGFITFNANGRRGQFAEIITLPIDFSREKKGYAEEALKGGVDSLRKLIIVRRCIRGRNKYYLQLTISGEKPKKGRTLGMGNVGIDVGPSTIAISSLQGVHFDKLADKCDNIEHKLYLINRKLDRSRRANNPDNYNPDGTIKRGVRLVWKKDKDVKRYASLKQQRKELFRKQAEIRKQQHLEMANAMLSQGDTFIVENNPIDAWVRRAKETKKTKTGKNRCKKRYGKSVANHAPAMFVSILKNKVLSLGGEFREVNPGYAATQFDFTNGVFTKHEVSERSITLSNGRTHQRDMLSAFNLQHICNELKEYNITQMQADYPIFCRLETAEQERFKEARRNERDALYFVGAFAKELRHSPQEETVANRHNGGVGRKHSNTLCTENAKITGSGLVRESIERVAEAPEECYHFDCQPIILDGL

SEQ ID NO: 2952 - protein, 528 aa, unidentified
  REGION 1..528: note = Category: MG91 effectors
  REGION 1..528: note = Description: MG91-144 effector
  source 1..528: note = uncultivated organism sequence
MNEVFVLELPLQIEKYQADALNKRYEQLRQLYNYVQGKLLRQHRYFEQMKEYQACKKIKEKRFFFRSHPFQINETLKGNKIPFKVSFDEYSIKGYIEKLVQKSVGPNMTYADLGFTTNILDHLGASVWAAWDKKLYDLKAKRISFKKYGELDSFSSRRKVVRGVVYFSGMELHLDSMELAIKMNGKVGKDAKFITLKMLHNPKHADYELWALKGGVDSVKVVKVVRRLVRSQYKYYVQLTIEGEKPQKGRTLGKGNVGIDLGPTTVAVSGVNVVSIDKLASKCDNIQEEITQLSRKIDRSRRANNPQNFNEDGTIKRGIKLVWSDSKRYKELRRELAELRRKQAVIRKQQHIERANALLKEGDTFIVENNPISSWTTRAKETKVNEKTGKIQKKKRFGKSVANHAPSMFVSILENKVKSLGGRFERVSTQNAASQYDFTTDTFKTGEEKHKLNERAITLSNGDTHQRDMLAAFNLQHLKYDEKDAKQYDIEAMTADYERFSQLEQEEILRYKNKVKKDDRGTIGAEKL

SEQ ID NO: 2953 - protein, 484 aa, unidentified
  REGION 1..484: note = Category: MG91 effectors
  REGION 1..484: note = Description: MG91-145 effector
  source 1..484: note = uncultivated organism sequence
MAHKENQKAFVVTFPLRTEKWQEDRIDKMMRMLTTFYNDRQRKLVRRYIYLSHSKAYKEAKGKGVVAFKNYMKENGFSQYGLDAFFKADTKGALYQCGLNSMFLQYLSQCAWSAWDKKLFGKGDFVKTDKVINIFCSRNKKERFCGFDYDLSTFTISIKSTCTKKIICTIPFVVNKKSDYELFALSQRICRIGIVRKLIRGKYKYYVQFTFDGVPYHKGRNIGTGIVGIDPGPSKIAIVGDNKVEIAKLAPNIEEDERKTARLKRKLDRSRRATNPHMYKEDGTIIKGQRQTCFSKVYNETRKQLADAQRKLAAKRKIAHNELANTLLEYGDTFKVEANSYKSMQARTKATSMTKSGRIRSKKRYGKSIKNRAPSEFLVILKNKLLHYPNGKYYAVPASYACTQFDFTNESFTEHKISERKIVTSDGVQHNRDTLAAFNIKNAIVNETSTKKKKITKSNEFFDIVRMKASYNEFCLMERYLLSI

SEQ ID NO: 2954 - protein, 603 aa, unidentified
  REGION 1..603: note = Category: MG91 effectors
  REGION 1..603: note = Description: MG91-146 effector
  source 1..603: note = uncultivated organism sequence
MAKENFVLTLPLRVEKRHADILDKRYELLRQMYNMVQQKLVRQYIYFSQQKAYKACENFEQKREFFNTHPFHFKGIKGKNGELCDIKFPYTYESRSSSSGKRPSGGISDYVSKLWSHKVGADKKLVDFGLNGSIMEELGLHVMKAWEDRLYKFKARRVSFKDYGEINSFGCRYHKGNFAGFTINLEEGFITFNANGRRGQFAEIITLPIDFSREKKGYAEEALKGGVDSLRKLIIVRRCIRGRNKYYLQLTISSEKPKKGRTLGMGNVGIDVGPSTIAISSLQGVHFDKLADKCDNIEHKLYLINRKLDRSRRANNPDNYNPDGTIKRGVRLVWKKDKEVKRYASLKQQRKELFRKQAETRKQQHLEMANAMLSQGDTFIVENNPIDAWVRRAKETKKTKTGKNRCKKRYGKSVANHAPAMFVSILKNKVLSLGGEFREVNPGYAATQFDFTNGVFTKHEVSERSITLSNGRTHQRDMLSAFNLQHIGNELKEYNITQMQADYPIFCRLETAEQERFKEARRNERDALYFVGAFAKELRHSPQEETVANRHNGGVGRKHSNTLCTENAKITGSGLVRESIERVSEAPEECYHFDRQPIILDGL

SEQ ID NO: 2955 - protein, 528 aa, unidentified
  REGION 1..528: note = Category: MG91 effectors
  REGION 1..528: note = Description: MG91-147 effector
  source 1..528: note = uncultivated organism sequence
MKTKEEKKDFVIELPLKVEKWQEHLLSKRCEFLRDIYNYVQNNLLRQFGYFEQMSEWKNCKTKKSKGKFLESHPFTIKGFDTPITFTKYGISNFVSKLCQKKVSREKKYKDFGLNSMTLQQMGLNVWSAWNKKIYDKPRVIKNKETGEIKIKPYEIHFKKRGGLNTIFFGKSNNYFIGLEIDFEHMILYYNINGKQGKNKQSITLPIVFNKPTEYEMFAFKGGYETIKLIKIVRKLIRGRYKFYVQFTIEGEKPQKGRTLGKGVVGIDVGPSTVAVSSLNGVQINTLAEKCDDVYHKCKLLGRKMDRSRRATNPQNYNDDGTIKKGEKLEWNYSKRYLKVRNKRCELLRKQAAIRKLQHNIDTNELLRLGDTFVVEKNPISAWQQRGKKIKINKRGRIQTNKRFGKSIANHAPAMFITILENKVKSLGGEFKRVPIENGASSFDFTNSEFVKHGLSERKITLSNGNVHQRDMIAAYNLQHLNYNSEELKDYNIEDMKKDYPIFCELEKMEIDKYISGQKKSHKSTVGY

SEQ ID NO: 2956 - protein, 524 aa, unidentified
  REGION 1..524: note = Category: MG91 effectors
  REGION 1..524: note = Description: MG91-148 effector
  source 1..524: note = uncultivated organism sequence
MNEVFVLELPLQVEKYQADILNKRYEQLRQLYNYVQGKLLRQYRYFEQMKEYQACKTIKEKRDFFKSHPFQVNESLGGDKSAFEISFNEFSIKGFIEKLVQKSVGANMTYADFGFTTNILDHLGASVWAAWDKKLYDFKAKRISFKKYGELDSFSSRRKVVGGKVYFSGMELHLDTMELAIKMNGKQGNNAKFITLKMQHNPKHAEYEMWALKGGVDSVKVVKVVRRLVRSQYKYYVQLTIEGEKPQKGRTLGMGNVGIDLGPTTVAVSGENVVSIDKLASKCDNIQEEITRLSRKIDRSRRANNPQNFNEDGTIKRGIKLVWNDSKRYKELRRELAELRRKQAAIRKQQHIDRANALLKEGDTFIVENNQISGWATRAKETKVNQKTGKIQKKKRFGKSIANHAPSMFVSILENKVKSLGGEVVKVDTKNAASQYDFTNGSFTKHELKERNVTLSNGDTHQRDMFAAFNLQHLKYDETEAKQYDTKAMAADYERFCQLEQEEIQRYKNKEKKDDRSTIGAEKL

SEQ ID NO: 2957 - protein, 557 aa, unidentified
  REGION 1..557: note = Category: MG91 effectors
  REGION 1..557: note = Description: MG91-149 effector
  source 1..557: note = uncultivated organism sequence
MVTQKCRPLTGVGAESRAGFQVMVTQKCWLIEIMEEVFVLELPLQVEKYQADILNKRYEQLRQLYNYVQGKLLRQYRYFEQMTEFQACKKIKEKRDFFRSHPFQINETLKGNNTPFKVSFDEYSIKGFVEKLVQKSVGPNMTYADLGFTTYILDHLGTSVWSAWNKKLYDFKAKHISFKKHGELDSFSSRRKVVRGVVYFSGMELHLDTMELSIKLNGKVGKEAKFITMSILHNPKHAEYEMWALKGGLESVKVVKVVRRLVRGQYKYYAQLTIEGEKPQKGRTLGKGNVGIDIGPTTVAVSGENIASIDKLASKCDNIQEEITRLARKIDRSRRANNPENFNEDGTIKRGVRLVWNDSKHYKELRRELAELQRRQAAIRKQQHIDRANELLKEGDTFIVENNQISGWTRKAKETKVNEKTGKIQKKKRFGKSIANHAPAMFVTILENKVKSLGGEVVKVDTQNAASQYDFTNNSFEKHELKERSLILSNGDTHQRDMLAAFNLQHLKYDAPEKKQYDTEAMTQHYDRFCELEQAEIQRYKNKEKKDDRSTIGAGDL

SEQ ID NO: 2958 - protein, 524 aa, unidentified
  REGION 1..524: note = Category: MG91 effectors
  REGION 1..524: note = Description: MG91-150 effector
  source 1..524: note = uncultivated organism sequence
MEEVFVLELPLQVEKYQADILNKRYEQLRQLYNYVQGKLLRQYRYFEQMTEFQACKKIKEKRDFFRSHPFQINETLKGNNTPFKVSFDEYSIKGFVEKLVQKSVGPNMTYADLGFTTYILDHLGTSVWSAWNKKLYDFKAKHISFKKHGELDSFSSRRKVVRGVVYFSGMELHLDTMELSIKLNGKVGKEAKFITMSILHNPKHAEYEMWALKGGLESVKVVKVVRRLVRGQYKYYAQLTIEGEKPQKGRTLGKGNVGIDIGPTTVAVSGENIASIDKLASKCDNIQEEITRLARKIDRSRRANNPENFNEDGTIKRGVRLVWNDSKHYKELRRELAELQRRQAAIRKQQHIDRANELLKEGDTFIVENNQISGWTRKAKETKVNEKTGKIQKKKRFGKSIANHAPAMFVTILENKVKSLGGEVVKVDTQNAASQYDFTNNSFEKHELKERSVILSNGDTHQRDMLAAFNLQHLKYDAPEKKQYDTEAMTQHYDRFCELEQAEIQRYKNKEKKDDRSTIGAGDL

SEQ ID NO: 2959 - protein, 527 aa, unidentified
  REGION 1..527: note = Category: MG91 effectors
  REGION 1..527: note = Description: MG91-151 effector
  source 1..527: note = uncultivated organism sequence
MNEVFVLELPLQVEKYQADILDKRYEQLRQLYNYVQGKLFRQYRYFEQMKEYQACEKINEKKDFFRTHPFLINETLKGIKTPFMVSFDEYSIKGFIEKLAQKQVGPNMTFADLGFTTYILDHLGASVWAAWDKKLYDFKAKRISFKKYGELDSFSSRRKVVRGVVYFSGMELHLDTMELAIKMNGKVGKEAKFITLKMLHNPKHADYEMWALKGGVEIVKVVKVVRRLVRSQYKYYVQLTIEGEKPQKGRTLGKGNVGIDLGPTTVAVCGENVVSIDKLASKCDNIQEKITRLSRKIDRSRRANNPQNFNEDGTIKRGIKLVWKKDKDLKRYSKLKRELVELRRKQTAIRKQQHIDRANALLKEGDTFIVENNQISSWTMRAKETKVNEKTGRIQKKKRFGKSVANHAPSMFINILENKVKSLGGKVVKVDTKNAASQYDFTDGSFTKHELKERNVTLSNGDTHQRDMLAAFNLQHLKYNEKETKQYDTEAMAADYERFCQLEQEEIQRYKNKEKKDDRGTIGAEKL

SEQ ID NO: 2960 - protein, 528 aa, unidentified
  REGION 1..528: note = Category: MG91 effectors
  REGION 1..528: note = Description: MG91-152 effector
  source 1..528: note = uncultivated organism sequence
MNEVFVLELPLQIEKYQADALNKRYEQLRQLYNYVQGKLLRQHRYFEQMKEYQACKKIKEKRIFFRSHPFQINETLKGNKIPFKVSFDEYSIKGYIEKLVQKSVGPNMTYADLGFTTNILDHLGASVWAAWDKKLYDLKAKRISFKKYGELDSFSSRRKVVRGVVYFSGMELHLDSMELAIKMNGKVGKDAKFITLKMLHNPKHADYELWALKGGVDSVKVVKVVRRLVRSQYKYYVQLTIEGEKPQKGRTLGKGNVGIDLGPTTVAVSGVNVVSIDKLASKCDNIQEEITQLSRKIDRSRRANNPQNFNEDGTIKRGIKLVWSDSKRYKELRRELAELRRKQAVIRKQQHIERANALLKEGDTFIVENNPISSWTTRAKETKVNEKTGKIQKKKRFGKSVANHAPSMFVSILENKVKSLGGRFERVSTQNAASQYDFTTDTFKTGEEKHKLNERAITLSNGDTHQRDMLAAFNLQHLKYDEKDAKQYDTEAMTADYERFCQLEQEEILRYKNKVKKDDRGTIGAEKL

SEQ ID NO: 2961 - protein, 527 aa, unidentified
  REGION 1..527: note = Category: MG91 effectors
  REGION 1..527: note = Description: MG91-153 effector
  source 1..527: note = uncultivated organism sequence
MTEVFVLELPLQIEKYQADLLNKRYEQLRQLYNYVQGKLLRQYRYFEQMKEYQACKTIKEKRDFFRSHPFQITETLKGNKTLFTVSFEEYSIKGFVEKLAQKPVGSNMTYADLGFTTYILDHLGASIWAAWDKKLYDFKAKRISFKKYGELDSFSSRRKVVRGIVYFSGMELHLDTMELAIKMNGKVGKEAKFITLKILHNPKHAEYEMWALKGGVDSVKVVKVVRRLVRSQYKYYVQLTIEGEKPQKGRTLGKGNVGIDLGPTTVAVSGMNIVSIDKLASKCDNIQPKITRLSRKLDRSRRANNPDNYNEDGTIKRGVKLVWKKEKDLKRYSKLKRELAELRRKQAAIRKQQHIDRANALLKEGDTFIVENNQISGWTTRAKETKVNEKTGKIQKKKRFGKSVANHAPSMFVSILENKVKSLGGEVVKVDTKNAASQYDFTNNSFTKHELKERNVTLSNGDTHQRDMLAAFNLQHLKLDEAKTEQYDTAAMAADYNLFCQLEQEEIQRYKNKEKKDDRSTIGADKL

SEQ ID NO: 2962 - protein, 326 aa, unidentified
  REGION 1..326: note = Category: MG91 effectors
  REGION 1..326: note = Description: MG91-154 effector
  source 1..326: note = uncultivated organism sequence
MNEVFVLELPLMVEKYQADILNKRYEQLRQLYNYVQGKLLRQYRYFEQMADYQVCKTIREKRDFLKNHPFNINGVLDRRGKLLDITFDEYGIQGFVEKMIHKSVGNNISYADLGLNTLILDYLAASIWRAWDKKLYDLNAKRISFKKHGELDSFSSRRKVVNGTARFFGLELYLDKMELAVKVNGKQGKNAKFITLKIQHNPKHVDYEMWALKGGVDSVKVVKVVRRLVRSQYKYYVQLTIEGEKPQKGRTLGKGNVGIDLGPTTVAVSGENIVCIDKLASKCDNIQDEITRLSRKIDRSRRANNPQNFNENATIKRGIRLVWNDS

SEQ ID NO: 2963 - protein, 525 aa, unidentified
  REGION 1..525: note = Category: MG91 effectors
  REGION 1..525: note = Description: MG91-155 effector
  source 1..525: note = uncultivated organism sequence
MTEVFVLELPLQVEKYQADILNKRYEQLRQLYNYVQGKLLKQYRYFEQTKKFRACKTIKEKRDFFKKHPFHINGILGSNKELLDITFDEYGISGFVTKLGMKNIGSNISYTDVGINSSILAKLSSNIWSSWIKFLYDSKAKRIAFKKYGELNSFGCGKKTNGSRKKIFSGMELNLERMELSIKLNGKVGKSAKFIILPILHNPKHEDYEMMALKGGFDSVKVITVVRRMVRGHYKYYLQMSIEGEKPQKGRTLGKGNVGIDLGPTTVAVSGENIASIDKLAPKCDNIEAAKVKLSRKIDRSRRANNPLNFNKDGTVKRGVRLVWNDSNRYKALRCEMAELHRKQAAIRKQQHIDRANALLKEGDTFIVENNQISGWTRRAKETKVDETTGKIRKKKRFGKSVANHAPSMFVTILENKVKSLGGQVVKVDTQNAASQYDFTNDSFEKHELKERSVTLSNGDVHQRDMLAAFNLQHLKYDETEKKKYNRKAMEQHYERFCELEKEEIRRYKEKEKADDRSTIGTSNF

SEQ ID NO: 2964 - protein, 405 aa, unidentified
  REGION 1..405: note = Category: MG91 effectors
  REGION 1..405: note = Description: MG91-156 effector
  source 1..405: note = uncultivated organism sequence
MPRFKSSKRGLHSIEGKTNKTGLKFRPEKKVLNWCGHDYRVLIDPKDDYIQRALKENERSDKYRKIKYCRLVRKRIRSSDRFFLQVVLEGTAPVKHVYAPVTERAAIDPGPQSIALFSKEFAGKIQVAGSNNFNEAVSRRLLRAMDRSLRRNNPDAYNEDGTIKKGAKLVKSKNYQRKVDRLREMHREAAAERKCRHGQTINLLLSIAGDIRIEKNSWKAFQRGHFGKSLGKSAMSGFIAQLKSKAASAGLKVTEVNPYKLKLSQYDPYTDTYRKKDLSERWQEMKAGSGQYIQRDVLSALLLYCANIEKEIHIPKVAVEQLEGAKQFLTDAGYVVLKSTSGRDQRDPRLASEPKAMTPEMARQKILRGAGDSHLPTDQELGQIRAGGKVSTWSKETFPLQRGVV

SEQ ID NO: 2965 - protein, 530 aa, unidentified
  REGION 1..530: note = Category: MG91 effectors
  REGION 1..530: note = Description: MG91-157 effector
  source 1..530: note = uncultivated organism sequence
MTSQSFVIELPIAVDDAEMRTIVRKLEFARQLHNATLGTAMGQLQQMRQDAAWKEACVMPKGKERAAAFRALDRKYGLTEYDLHSVIARHREGSGRKAELGINETQKIATRVFQAINRYKLGLGGMPRFKSSKRGLHSIEGKTNKTGLKFRPEKKVLNWCGHDYRVLIDPKDDYIQRALKENERSDKYRKIKYCRLVRKRIRSSDRFFLQVVLEGTAPVKHVYAPVTERAAIDPGPQSIALFSKEFAGKIQVAGSNNFNEAVSRRLLRAMDRSLRRNNPDAYNEDGTIKKGAKLVKSKNYQRKVDRLREMHRVAAAERKCRHGQTINLLLSIAGDIRIEKNSWKAFQRGHFGKSLGKSAMSGFIAQLKSKAASAGLKVTEVNPYKLKLSQYDPYTDTYRKKDLSERWQEMKAGSGQYIQRDILSALLLYCADIEKEIHIPKVAVEQLEGAKQFLTDAGYVVLKSTSSRDQRDPRLASEPKAMTPEMARQKILRGAGDSHLPTDQALGRIRAGGKVSTWSKETFPLQRGVV

SEQ ID NO: 2966 - protein, 528 aa, unidentified
  REGION 1..528: note = Category: MG91 effectors
  REGION 1..528: note = Description: MG91-158 effector
  source 1..528: note = uncultivated organism sequence
MKEIFVLELPLKVEKYQADILDKRYEQLRQLYNYVQGKLLRQYRYFEQMKEFQACKKIKEKRDFLRNHPFHVNGIYGLNKELLDISFDEYGILGWVTKLGQRSISLGRTYSDMGITARMLANLSDNIWSAWKKKLYDYHADRISFKKHGCLNTFGCTKSVTKHGGKVKEYFSGMVLHLERMELDIKTNGRTRKTATFITLPILHNPKHADYEMMALAGGVSSIKVLTVVRRMVRGRYKYYLQMSIEGEKPQKGRTLGKGNVGIDLGPTTVAVSGENVVSIDKLASKCDNIKSEIGKLNRKIDRSRRANNPQNFNEDGTIKRGVRLVWNDSKRYKALLKEKAEMQRKQAAIRKQQHIDRANALLKEGDTFIVENNKISGWTARAKETKVNEKTGKIQKKKRFGKSVANHAPAMFVTILENKVKSLGGQVVKVDTQNAASQYDFTNDTFNKHELKERSITLSNGDTHQRDMLSAFNLQHLKYDEKELKQYDKEGMKDHYKQFCKMEKEEIERYKNKEKKDDRSTIGAEGL

SEQ ID NO: 2967 - protein, 601 aa, unidentified
  REGION 1..601: note = Category: MG91 effectors
  REGION 1..601: note = Description: MG91-159 effector
  source 1..601: note = uncultivated organism sequence
MIEEFVLTLPLKVELWQADILNKRYEHLRRIYNMVQRKLLRNYIYLSQQDAYRQCKDNNEKRDFWENHPVTIKEFCDKNGNPAIVKFPYTLSRRSKNSGKKASNGISDFVPKFKNHNIGSGLTYGALGINASILEELGLRIQQAWEKRLYNPKSKHISFKEEGDINTFGCREKRGFSGFVLDLSHMMLLVNINGRQHQLAQYLNLPINPNKELTEYEMYALKGGLSSVRKIIISREYIRGRYKYYVQLTIKGEKPQKNRTLGKGTVGIDVGPSTVAVSSLQGVSLDKLADKCDDIERDLWRINRKMDRSKRATNPDFFNKDKTYSKRKKDERRKWTFSNRYKRLKLERRELYRKQAAIRKQQHIEMANALLSQGDEFIVENNPIDSWAKRAKETKKGKNGKNRCKRRFGKSIAHHAPAMFVSILQNKVRSLGGSFREVEIKNAATQFDFTNGEFTKHELNERTVTLSNGRTHQRDMLAAFNLQHLKEEVKDYDIEQMDVDYPLFCKLEEKGIAQFKENRHLDRDVAYFVGASHKTLKFSSANRHNGGVGRKNCNHHSGGRDVAKTGNKSSIMKNCESLEPVSVLPNEYHHSNHQHLKIDGL

SEQ ID NO: 2968 - protein, 483 aa, unidentified
  REGION 1..483: note = Category: MG91 effectors
  REGION 1..483: note = Description: MG91-160 effector
  source 1..483: note = uncultivated organism sequence
MAHKENQKAFVVTFPLRTEKWQEDRIDKMMRMLTTFYNDRQRKLVRRYIYLLHSKAYKEAKGKGVVAFKNYMKEHGFSQYGLDAFFKADTKGALYQCGLNSMFLQYLSQCAWSAWDKKLFGKGDFVKTDKVVNIFCSRNMKGRFCGFDYDLSTFTISIKSTCTKKIICTIPFVVNKKSDYELFALSQKTCRIGIVRKLIRSKSKYYVQFTFDGVPYNKGRNIGTGIVGIDPGPSKIAIVGDKKVELRKLAPNIIEDERKTARLKRKFDRSRRATNPHMYKEDGTNIKGQRQICFSKAYNETMKQLAEAQRKLAAKRKIAHNKLANTLLEYGDTFKVEANSYKSMQARAKATSMTKSGRIRSKKRYGKSIKNRAPSEFLVILKNKLLRYPKGKYYDVPASYACTQFDFTNESFTQHKISERKIVTSDGIQHNRDTLAAFNIKNAIVNDISKKKKITKSKEFFDIVRMKASYNEFCLMERYLLSV

SEQ ID NO: 2969 - protein, 602 aa, unidentified
  REGION 1..602: note = Category: MG91 effectors
  REGION 1..602: note = Description: MG91-161 effector
  source 1..602: note = uncultivated organism sequence
MIEEFVLTLPLKVETWQADILNNRYEHLRHIYNMVQRKLLRRYIYLSQQNEYRQCKDNDEKRTFWENHPITFKDFCDKNGNPAIVKFPYTYSHRSKDSGKKASNGISDFVPKFKNRNIGGGLTYGSLGINASILENLGLRIEQAWKKRLYDPKSKHISFKEEGDLNTFGCREKDGFSGFVLDLQKMTLSFNTNGRQGKSAKFIHFTINAGKELTEYEMYALKGGIGSIRKIVVSREYVRGRYKYYVQLTIKGEKPQKNRTLGKGTVGIDVGPSTVAVSSLQGVSLDKLADKCDDIERDLWRINRKMDRSKRATNPNFFNKDKTYSKRKKDERRKWTFSNRYKRLKLERRELYRKQAAIRKQQHIEMANALLSQGDEFIVENNPIDSWAKRAKETKKGKNGKNRCKRRFGKSIAHHAPAMFVSILQNKVRSLGGSFREVEIKNAATQFDFTNGEFTKHELNERTVTLSNGRTHQRDMLAAFNLQHLKEEVKDYDIEQMDVDYPFFCKLEEKGIAQFKENRHLDRDIAYFVGASHKTLKFSSANRHNGGVGRKNCNHHAGSKRNVAETGNKSSSKKNCESMETVSLVPNEYHHSNHQHLRLDGL

SEQ ID NO: 2970 - protein, 537 aa, unidentified
  REGION 1..537: note = Category: MG91 effectors
  REGION 1..537: note = Description: MG91-162 effector
  source 1..537: note = uncultivated organism sequence
MSTKSFIISLPIITGDQDRRRLQKSFSFGCNLQNAVMGGGWDRVLKMRATAEWQTARAMPKSSERTKAFRDLRVRFRLSENDFHADVAKHRKASGRGHLLGINEGQKLASRAWISVERHLYNGGSPRFISSRRGLHSIEGKTNRTGIIWKADQQCVTVCKHVYRVRVDKRDDWLTRALQDPTDPTKPRKVKYCRIVREMRKGKERFLLQLVAEGTSPLKHAYAGKDLRMAIDPGLGSLTYATEDGTIAKVQIAPSADTDHRAVRKLQRAMERSRQATNPDNYETVEVVRHGKNHKSLKVKSGRLQWRFSKRYESLRAELAEIFRLSAATRKREHGEVCNWLLGHAGHIIVEDNSYKAFQRGRFGKTIGRHAPAALYAQLTNKAESAGLLVEVVSPKKLKPTQHNLLTGQFVKHELWERRVRLGEDDDERWIDRDAAACLNLLYADLEKQTYAPERICEAVLAGVTAWLDAGVVVIQAREGITEREFGRFRRRGIPSLTVQGLRQQGFRGRSDSKSGATPRRKASTVSKPSHLSGEVV

SEQ ID NO: 2971 - protein, 518 aa, unidentified
  REGION 1..518: note = Category: MG91 effectors
  REGION 1..518: note = Description: MG91-163 effector
  source 1..518: note = uncultivated organism sequence
MNNKKEDDIFVLELPLSVEKWQSDLLDRRYEYLRQIYNYAQRKLIRQYIYLVQTEEYKKCRTKKDKSSFFGNHEFWFNGIKCPITFTEFGIKKYVTKLCKLKVSSGMTYKDFGLNSSHLETLGANMWAAWDKKIYGKGERINIKRYGCLNTFSVRCKSGYFGGLKVILDGNEIYLFLDMNGKKGEKEKKEIKLTVKIGKMTEYEMQALRNGIENIRMVTIARKLVRGKYKYYVQFAIKDEKPKKGRKLGKGSVGIDVGPSTVAVSSLHGVEINTLAEKCDDIHRKVRLIQRKMDRSSRASNPQNYNEDGTIKKVRGQKLKWVRSKNYVRLRNEKRELMRKQAAIRKLSHNIDTNKLLELGDTFVVEDNPISSWTKRASGIRKGKNGKNLSNKRYGKSVANHAPAAYVEILKNKVESLGGKFIKVDTKNGASGYDFTTGEYTKHGVEKRKVTLSNGNVHQRDMLAAFNLQHLNYEDGELKSYNVEEMEKDYPIFCKLEKEEIKRYTSGQKTSHKSTVGY

SEQ ID NO: 2972 - protein, 459 aa, unidentified
  REGION 1..459: note = Category: MG91 effectors
  REGION 1..459: note = Description: MG91-164 effector
  source 1..459: note = uncultivated organism sequence
MKTAATTSFVAELPLRVGADVEALLERTFGFARNLYNATLGTVLGRYQALRESQAWQLARTLPKKEAGEEFNRLMRQADLTKSGFEKILNKHRHSSGRAEQLDCNSGQKIADRLWDAFMRYRTRQGGKPRFKSERRGIHSIEGKTNTTGFRWKAQEGCVRWGKRRLPVIVNKQDDWLMRALADPIDPSKRRRVKYCRILWRKFGGRKRWFVQLVCEGVSPIKHILAPTERKAGIDPSTKSMTVACACGAVEKVDLATPLKKADREIRLLQRKLDRSRRATNKDNYNEDKTVKKGASGWVYSKHYEKIRTVYADAQRRAAAHRKCVCNEAVNWVLGQAGCIIVEKNNFKAFQKSRYGKSISKAAPGQFVTNLNVKAVSAGLKVFIVPPYELRPSQHDIETGQYVRHELCERWVKLGQSGLWLNRNALAALNLLWLDDAATRYSAARRSERTLGSRETGWA

SEQ ID NO: 2973 - protein, 484 aa, unidentified
  REGION 1..484: note = Category: MG91 effectors
  REGION 1..484: note = Description: MG91-165 effector
  source 1..484: note = uncultivated organism sequence
MAHKENQKAFVVAFPLRSEKWQEDRIDKIMRMLTTFYNDRQRKLVRRYIYLSHSKAYKEAKGKSVVAFKNYMKENGFSQYGLDAFFKADTKGALYQCGLNSMFLQYLSQCAWSAWDKKLFGNGDFVKTTKVVNIFCSRNQKGKFCGFDYDLSTFTIRIKSTCTKKIICTIPFIVNKKSDYELFALSQKICRIGIVRKLIRSKYKYYVQFTFDGIPYNKGRNIGTGIVGIDPGPSKIAIVGDNKVEILKLAPNIEEDERKTARLKRKLDRSRRATNPHMYKEDGTTIKGQRQTCFSKAYNETRKQLADAQRKLAAKRKIAHNELANTLLEYGDTFKVEANSYKSMQARTKATSVTKSGRIRSKKRYGKSIKNRAPSEFLVILKNKLLYYPKGKYYDVPASYACTQFDFTNESFTEHKISERKIVTSDGIQHNRDTLAAFNIKNSIVNDTSTKKKKITKSKEFFDIKKMKASYNEFCIMEHHLLSV

SEQ ID NO: 2974 - protein, 530 aa, unidentified
  REGION 1..530: note = Category: MG91 effectors
  REGION 1..530: note = Description: MG91-166 effector
  source 1..530: note = uncultivated organism sequence
MKSSSIIVSYEITLPQRIYLHLDRLFSVFRRSVRNFIDMFWNENTLGLLNQKGHTCSILKEIVQRPQNLPSRVFRNALEITGQILRSQIERKRLFDAFMQYPCLVLYNEREIAKRLNTSTWFALNVKRQILKLIRNGERRDYFSLAKPSFSGSVVITSADDSLEKGQFKRLRIEKNKLIFELKVPVGNAWDWIKVEKFVPDRLRKALKNAKEIKAPLIKKVDLKSGFSIYRLVIPLEIQTKVKDKVERVFALDLSPSEKRIGVGVVVDSEGYSKPVFFNAYKMFKKLERLYREISNLEKKIDHIADDLHSTFKREHKEKLYQRLRHLYQEQKLRWRKFKDLRKQVLESFTNLVILHAKAYNCDAIAIEDLKFKDLPDWKNKRLRRIFSIWFYSKFEDRLRHKAQREGIKVLSVNPFNTSQVCHECGSKSKANRLEFACESCGKHFDRDYNASVNIGLKALTLACKTKSKPYKGKDIPARFPSLQVLTRYKFKSLLTLLSLSKLVAYLRLVETSYLKLKSLLKYVSADKYG

SEQ ID NO: 2975 - protein, 530 aa, unidentified
  REGION 1..530: note = Category: MG91 effectors
  REGION 1..530: note = Description: MG91-167 effector
  source 1..530: note = uncultivated organism sequence
MKSSSIIVSYEITLPQRIYLHLDRLFSVFRRSVRNFIDMFWNENTLGLLNQKGHTCSILKEIVQRPQNLPSRVFRNALEITGQILRSQIERKRLFDAFMQYPCLVLYNEREIAKRLNTSTWFALNVKRQILKLIRNGERRDYFSLAKPSFSGSVVITSADDSLEKGQFKRLRIEKNKLIFELKVPVGNAWDWIKVEKFVPDRLRKALKNAKEIKAPLIKKVDLKSGFSIYRLVIPLEIQTKVKDKVERVFALDLSPSEKRIGVGVVVDSEGYSKPVFFNAYKMFKKLERLYREISNLEKKIDHIADDLHSTFKREHKEKLYQRLRHLYQEQKLRWRKFKDLRKQVLESFTNLVILHAKAYNCDAIAIEDLKFKDLPDWKNKRLRRIFSIWFYSKFEDRLRHKAQREGIKVLSVNPFNTSQVCHECGSKSKANRLEFACESCGKHFDRDYNASVNIGLKALTLACKTKSKPYKGKDIPARFPSLQVLTRYKFKSLLTLLSLSKLVAYLRLVETSYLKLKSLLKYVSADKHG

SEQ ID NO: 2976 - protein, 633 aa, unidentified
  REGION 1..633: note = Category: MG91 effectors
  REGION 1..633: note = Description: MG91-168 effector
  source 1..633: note = uncultivated organism sequence
MLTKDLKQEALKRGFLHSGVNDSIEAYRTRNLTIYDFVCEESAVVRVCISKQHAGIYDVLSNIWKDCMLENYLEDPNQFANYMLSECAKKLLKTDSLFFDSKASFAIDAQIRKAKNWKKINQKENREKEIKKIMAGTNKPVPSGFKIFSEKLLCSAKRIMYSAKEKSLYCPECGNTFQLPDVPKKGSLHTCPACGYSTKVSSAQYLNDIHWSCIVQAAGKRSIIRYFCNELFIEYGKCSTILYEKYRTIVEEDGSMVPLMQTSEGWKDYKGKNYSYFYTVPKREVPNDMYLYGTVEALMKMPALKNSMLDVWVKQHIGADKKLCSEYLVENYIKVYAQTTIYEKLLKHGLNKIAHEAAFYYDSSFHKNEEKVDKFLNLTKGNLDRLREFIPDPSGSNVSAMRYLEKYNVYLKDDELKTFLRLEVSDNMKEQIVKFCKCKKVTLYKINKYVTENANADWSSYFDYIGWTEELDYKKSDSVYYPKKFFKTHDRVFKELEEKKDAIQRKKDKEISKKIADLWEQRMQIPQYYYENNDLFVMMPHGTSDLKKEGRSLNHCVAGYKEFVAEEKTQIFFIRKKAAPQKSFYTLEIKNHDIEQCHGKNNVNMTEEIRAFAYGFLNQLKTIKEKPAVRAAA

SEQ ID NO: 2977 - protein, 484 aa, unidentified
  REGION 1..484: note = Category: MG91 effectors
  REGION 1..484: note = Description: MG91-169 effector
  source 1..484: note = uncultivated organism sequence
MAHKENQKAFVVTFPLHTEKWQEDRIDKMMRMLTTFYNDRQRKLVRRYIYLSHSKAYKEAKDKGVVAFKNYMKEHGFSQYGLDAFFKADTKGALYQCGLNSMFLQYLSQCAWSAWDKKLFGKGDFVKTDKVVNIFCSRNMKGRFCGFDYDLSTFTIRIKSTCTKKIICTIPFVVNKNSEYELYALSQKICRIGIVRKLIRSKYKYYVQFTFDGVPYNKGRNIGTGIVGIDPGPSKIAIVSDEKVEIAKLAPGIEEDERKTARLKRKLDRSRRATNPHMYKENGTNIKGQRQICFSKSYNETRKQLADAQRKLAAKRKIAHNELANTLLEYGDTFKVEANSYKSMQARTKATSMTKSGRIRSKKRYGKSIKNRAPSELLVILKNKLLYYPKGKYYDVPSSYACTQFDFTNESFTEHKISERRIVTSDGIQHNRDTLAAFNIKNTIVNDTSTKKKKVTKSKEFFDIVKMKASYNEFCLMERYLLSV

SEQ ID NO: 2978 - protein, 511 aa, unidentified
  REGION 1..511: note = Category: MG91 effectors
  REGION 1..511: note = Description: MG91-170 effector
  source 1..511: note = uncultivated organism sequence
MPSQATTPSFVVELQLRIGSDVEQVLERTFRLAQCLHNATLCTVLKRDGELRASDAWRAAKAMPKGKERTAEFKRLMESAGLTKNGFEKILLDHLRKSGRRDQIDSNTEQKIADRLWDAYQRWRYENGGKPRYKGKRRGLHSLEGKTNKSGIRWKPDNQCIEWLGCRMLARVDKSDELLMRALADPQDPQKPRKVKYCRVLWRNINKRKRWFVQLVCEGTSPVKHVFAPADIKAGIDPSLRSMTCFVEDGTVEKIDISAGLAKSARTIRNVQRRVERKRRSNNPKNYDEKGRVKKGPLKWNISKKQRDLEAKLAECHRKAAAHRKNKAGELANWLLGRAGCIHVEKNQFKAFQRSGFGRSILKGAPRQCITMLKAKAASAGLKVFEVSPRKLRPSQHDIETGEFIKHGLSERWIKLGESGLWINRDAMAALNLLWVDESGENYLPSDDCKKHWEAVKCVLLDAGWLVQLEARDEASEIFLRRFRRKDRPALTVGELRQKRNRGRSDDSSAA

SEQ ID NO: 2979 - protein, 530 aa, unidentified
  REGION 1..530: note = Category: MG91 effectors
  REGION 1..530: note = Description: MG91-171 effector
  source 1..530: note = uncultivated organism sequence
MTSQSFVIELPIAVDDAEMRTIVRKLEFARQLHNATLGTAMGQLQQMRQDAAWKEACVMPKGKERAAAFRALDRKYGLTEYDLHSVIARHREGSGRKAELGINETQKIATRVFQAINRYKLGLGGMPRFKSSKRGLHSIEGKTNKTGLKFRPEKKVLNWCGHDYRVLIDPKDDYIQRALKENERSDKYRKIKYCRLVRKRIRSSDRFFLQVVLEGTAPVKHVYAPVTERAAIDPGPQSIALFSKEFAGKIQVAGSNNFNEAVSRRLLRAMDRSLRRNNPDAYNEDGTIKKGTKLVKSKNYQRKVDRLREMHRVAAAERKCRHGQTINLLLSIAGDIRIEKNSWKAFQRGHFGKSLGKSAMSGFIAQLKSKAASAGLKVTEVNPYKLKLSQYDPYTDTYRKKDLSERWQEMKAGSGQYIQRDILSALLLYCADIEKEIHIPKVAVEQLEGAKQFLTDAGYVVLKSTSSRDQRDPRLASEPKAMTPEMARQKILRGAGDSHLPTDQALGRIRAGGKVSTWSKETFPLQRGVV

SEQ ID NO: 2980 - protein, 530 aa, unidentified
  REGION 1..530: note = Category: MG91 effectors
  REGION 1..530: note = Description: MG91-172 effector
  source 1..530: note = uncultivated organism sequence
MTSQSFVIELPIAVDDAEMRTIVRKLEFARQLHNATLGTAMGQLQQMRQDAAWKEACVMPKGKERAAAFRALDRKYGLTEYDLHSVIARHREGSGRKAELGINETQKIATRVFQAINRYKLGLGGMPRFKSSKRGLHSIEGKTNKTGLKFRPEKKVLNWCGHDYRVLIDPKDDYIQRALKENERSDKYRKIKYCRLVRKRIRSSDRFFLQVVLEGTAPVKHVYAPVTERAAIDPGPQSIALFSKEFAGKIQVAGSNNFNEAVSRRLLRAMDRSLRRNNPDAYNEDGTIKKGAKLVKSKNYQRKVDRLREMYRVAAAERKCRHGQTINLLLSIAGDIRIEKNSWKAFQRGHFGKSLGKSAMSGFIAQLKSKAASAGLKVTEVNPYKLKLSQYDPYTDTYRKKDLSERWQEMKAGSGQYIQRDILSALLLYCADIEKEIHIPKVAVEQLEGAKQFLTDAGYVVLKSTSSRDQRDPRLASEPKAMTPEMARQKILRGAGDSHLPTDQALGRIRAGGKVSTWSKETFPLQRGVV

SEQ ID NO: 2981 - protein, 723 aa, unidentified
  REGION 1..723: note = Category: MG91 effectors
  REGION 1..723: note = Description: MG91-173 effector
  source 1..723: note = uncultivated organism sequence
MAEEKEMRSYNIRINPDADAIKVIERDMKLMEQLYGFIIYKIESHIQQLRDETEYGEYDSNYKEYCRLMAEAEQKKRQCEVLRDAKKRKNIEDPELDSQYKELSAEIIKLDKHRKEWCRKCCEFFKNNKKALCHFVFESRRKVIRLKSDMVTPTENSGFILHHGVNGELYYIYDKTYYMMVEDSIRKANKGDGYSALVCECGVVTKRVSLNEDKTFKDKVYDGVAVLTDDGEIIMPYEYLRIDKLNKNNAHSFSILFVGEYVYSLNKNPKTKKSQKTSMAYKDFGFTSTDFFENIGNRLTLSYADFPKLLSQKHRKNDFMTIMCGYQSKLMDIMCDESGGYFVRMVTHSYGRGKKKYVDIPVLVSHRNKNRIGTERDMDTKVLEKKLKLLETGKTNVIGISKDVIREKSRYYVNIFLEHTGSLGLEYNENSLNQELGVGSVGVDPNMHQIAVYSDSLKKSTIFSLETIRGGIFKQKIYDCYSKLNSLQTKMSRCMDENNSGAKDENGNFIKGKKLFKSKRYLAMKKEVGELHRRIAELKETANIFIAHELLSYGNVFYIEDPRSAEKKRRMQGVVYDVKGRVVKNRKFSRSIQKFSISGMIYKALDVIESRGGKVYWINNKSAATAYVPKGDNVSHGMGERVFNWLGYKVQRDMKSGYVLSGCKELEQTKETYLNKPIYKVVSYDDERLLNDVDVFAESVKEEMERCRDLNVEDKTIGVEKYF

SEQ ID NO: 2982 - protein, 1129 aa, unidentified
  REGION 1..1129: note = Category: MG91 effectors
  REGION 1..1129: note = Description: MG91-174 effector
  source 1..1129: note = uncultivated organism sequence
MKKLLSINLGITSIGYSVLNELDNDKYSLIDYGVNMFDTPYDKDGNSKKLIHSQIKSTKKLYELRKERKKNLSKLFEDFGFAKKEDFLNQEKENLFINKWGLRAKKAFEEKLTFQELFSILYLIAKHRGYKSLDTDDLLEEFCEKLGLNQEKKKDNGKDNEKGKIKQALKTIETLKLQFPQKTIPQIIYEVEIQKENPTFRNHDNYNYMIRREYINEEIKALVLSQEKFGLFDKNFDSKAFIEKLIETIDDQKESSNDLSLFGNCEYLKNEKVAHQYSLLGDIYKMYQSVANITFNSNPTIKISKEQIKLIANDFFDKLKNGKNISDIKYKEIRKILKLSDDFKIFNKEDSYKSKDKTQENSITKFHFVNNLSKFDKDFIKSILEKSNKYDILKEVFDVLRDEKQPKPIYDKLNNIFSKYDLIKNESIKNNTILELIKNKTGSSLSISHQAMINIIPYFEDGSTIDEIKQKLNLSREEDYLSYKKGIKYLSVAQFENNNNLPINNHPVKYVVSAALRLIKHLHVTYGAFDEIRVESTRELSLNDESKRNIDKVNRENEAKITAILENIEYQQIAQTYGKKLEKYARKILIWDEQERFDIYNGKSIGFGDIFSNSVDIDHIVPQSLGGLSVKHNLVLVHRDTNLQKLNQLPLNFIADKQGFIDRIEYLFKEHKISWKKRKNLLATNLDDTYKDTFESKSLRATSYIEALTAQILKSYYPFPNQTKNSMEVRHIQGRTTSNIRKLLKVKTKIRNTNIHHAIDAILIGLTNQSWLQELSNTFRENMGVIDDVARQNIKKVIPLIEGIEPKELIEMIENNYNAYGEDSIFYKDIFGKTKAVNFWVSKKPMVSKIHKDTIYSKKPNDFYTVKENILNQFIALKVNNDTKANKFYEDFKKNILEKMYVYKTNPNDVICKIVQNRAYDIKELLTSFETIDKKDKEALSEAKQKLDTLIHNPLLDNNNKPIRKVKFYQTNLTGFNIRGGLATKEKTFIGFKASLKNDKLFYERIDVANKNNIKDNDFLIIRNNLICINFKNKNLLGFVESFDENTNKIRMYDSRYPKRLENQPERFKVASGKGRKEFGIAGAIGIIKLNLDILGNINSYQIIGTIQNELYSFFKKLKNDKGNLPINT

SEQ ID NO: 2983 - protein, 1350 aa, unidentified
  REGION 1..1350: note = Category: MG91 effectors
  REGION 1..1350: note = Description: MG91-175 effector
  source 1..1350: note = uncultivated organism sequence
MSNINYYLGLDLGTDSVGWAVTDPNYKLLRAKGKDLWGIREFEAAKTSAERRSYRTSRRRKQRKTVRIGLLKEYFKDEIDKVDSNFYESLENSFFKKEDKPEGARSKNLLFNDKDFKDSDYYEKYPTIFHLRSELIHSKEPHDVRLVYLAILNIFKHRGHFLNENLSTSSTSVSIEEVYSELRNLLIDKTDIKLPDKIDEKNFEEVMCDRGLSRSEKQKRILDQLEISSKDKDKVEIIKAICGLKVDAKKIFPIESDEKLAFCFAEARFEEIQGDLENSLGDDYFSIIMLMKQIYDTCAWDTVIKGFEYLSDARIDSYNKHARDLKILKKVLKKKGQDAYDRFFRTEEDGTYGDYVGSNVNDGKVGRRGGNKHTRDDFYSAVKNEIKGVDDLDVEVIQSDIDNGTFMPLQLSRDNGIIPYQAHYKELDAILENAQKYLPFLSEKNAESQMTISEMIKKIFAFKIPYFVGPVTEESKKNNGNGWVVRKEEGPVLPWNIDSKIDMEKTSEEFINRLIRKCTYISGEKVLPKNSLIYERYMVLNAINTIAIDGERISVELKQQIYNDLFSKGTVVTKEKLAKYLSGRGLINSKNQISGMDDRINNTLSNYNKFYRIFGNEIKKDSTQNMIEEIIRLCTIFGDSKKDLKNKLEKEYGDKLSKEQLKSILGIKCKDWGKLSKAFIELQGADKSTGEIFSLINALWNTSFNMMELINSDEYTFKEELNKKMETGLKPVNEMVYEDLDGMYLSAPVRRMVWQTLLVIRELEKVLGCPPKKVFVEMTRGDGEKVRTKSRKDVFSELYKKIKEDTPKWLEIIGKAEENGTIRSKKMYLYLRQKGKDMYTGKPISLDDLFNDNLYDIDHIYPQSLTKDDNLDNNMVLVNKSDNSNKQNVYPLSEDIRNKCKGLWKELHDQGFINDEKYSRLTGRSPLTDEQLEEFIARQLVETSQGTKAVAQIMSGAMPESKVVYSKARVVSDFRNKYELLKSRLVNDFHHANDAYLNIVVGNAYLVKFTDNPKRYIKEEYNKDKEKYRYNLAKFFENDVIRGKEVAWVSTKENGEIGTIATVKKMMSKNTPLLTRMNFVGHGGIADQTLYGTDKAKEDGYLPIKGKDSKFKVSKYGGYNKASTAYFFLVESEVKGKKQRTLETVPIFLAAEIDRHPGKLEEYCINDLGLINPDIRIRKIKLQSLVKKDGYLIHITGKTLDRIALRNATGLKLDISWINYIKKLENFAEKGSMESGVISKDKNIELYKLLMDKHKNGIFKNRPNPIGEKLENKLSMFMGLEQEKQINVLVQLLNTTAIVSAAKADLTDIGEAKATGVMLISKKIEGYKRIFLVNQSVTGLYEEEIDLLTV

SEQ ID NO: 2984 - protein, 610 aa, unidentified
  REGION 1..610: note = Category: MG91 effectors
  REGION 1..610: note = Description: MG91-176 effector
  source 1..610: note = uncultivated organism sequence
MIIFTKISEFIISYWMPVKKDDKPRFVLEMPLKVEQWQADILNVRYELMRRMYNQARRILLSHFYYMVQKNEYQECASNKRERAVYIKNHPIFIKGVTDKKGNVKPITFTEFGIKDVVLSFVTRDVGSGKTYKDFGINTSFADCVASNLWAAWEKFMYDGKCKGVAFKRRFNTISIGKNNGCFGGLKLSLESMTLSVNVNGKQKGNAKFITLPVCGDNQSEYEMQALQGGLESICVVSIARKLIRGKYKYYLQLTIKGHAPNKGRALGCGTVGVDVGPSTVAFVSQSDVQINRLASECDDIEDVIGKIQQKMDRSRRATNPQNFNEDGTLKRISRKNGERRIWNDSRRYRLLCKQKAELQRKQAAVRKMSHILKINQILSLGDTFFVENNPISQWTKRAKETKVSEKTGRYCSKKRAGKSVANHAPAMFVTLLKNKVQSLGGRCREVDIKNAASRFDFTDGQFKVHGLDERIVTLSNNKTHQRDILAAFNLQHIICVDDDKKLKKYDIVRMYADYPAFCDMERAEIEKFVSGEKETDRHTIGAIEELKVVLSSHADDPSVLYSVDKLSANSEGNKTGKKAGSALVHESNDRVLEVLNESTLFTIKDLHVT

SEQ ID NO: 2985 - protein, 1127 aa, unidentified
  REGION 1..1127: note = Category: MG91 effectors
  REGION 1..1127: note = Description: MG91-177 effector
  source 1..1127: note = uncultivated organism sequence
MSKKILSLDLGITSIGYSILEEVSENRYSLLDYGLSMFDKATDKDGNSKKLLHSSASSAKNLYTLRKERKKSLAKLFELFNFSTSLKLLNQEKENLYINKWELRAKEAFCRRLEVGELFSILYALAKHRGYKSLESGDLLEELCEELNLECNLTKKTEDEDTGKIKLALKTVESLRLDNPHKTVAQIIYEEEILKFTPTFRNHDNYNYMIRREYINDEIKKILLAQEKFGFFKSDFDVTAFIDSVIEIIDDQKESTNDLSLFGNCEYYPKHKVAHQYSFLSDIFKMYESVSNITFNTKPTLKITPSQIKLIAEDFFAKVKKGKNIGDIKYKDIRKVLKLDDDVKIFNKEDSYLRAGKKIENSIIKFHFVNSLSKIDNSFIVIALEDERGYEVLQNIFDVLAYEKSPKSIYEKLKNLVDEKTIIALIQNKHGNSLNISHYAMLQFIPYFEEGLTTDEIKKKIGLERKEDYSKYRKGIKHLNIVEFEKDENLEINNHPVKYVVSATLRVVKHLHSVYNGFDEIRVESTRELSQNEQTKKDIEKANRAQEKEFSRIVEDKEYQKIADSYGKNIKKYARKILLWEEQEYLDIYSGKVIGLGEIFSNEVDLDHIVPQSLGGLSVKHNFVLAHRDTNVQKSNRLAVDFVSDKEAFINRVEHLFSSHKINWKKRKNLLATNLDETFQDVFESKSLRATSYIEALTAQLLKCYYPFIDKKKQVDGSAVRHIQGRATSNIRKLLGVKTKVRDTNIHHAIDALLIGFTNHSWLQKLSNTFRENKGVINDEARAKIKKEFPIIELVVNDEVEYLEPKELCERIENTFNCYGEESVFYKDIWGKNRVVSFWVSKKPMVSKIHKDTIYAKKKEGIFTVRENIINKFIGLKITPTMSSQKFMDIFKKNILEKMYLFKVNPKDFISLVIQKRADEIAELLESFETLDKKDKESMSQAKVDLEVLIHKEILDNSENSIRKVKFFQTNLTGFDVRGGLATKEKTFIGFRAWLEDDKLHYVRIDVANFKKIQKLNDSSFKVYKNDEIFFIMPDGSRRGGKIVSFLEETKKSAFQNAKYPTSSEYQPMQFCKMDKGKKSGAKQQSIGKAIGIIKLNIDIIGNIKSYQVIGNAESELLDFVKETVHG

SEQ ID NO: 2986 - protein, 1127 aa, unidentified
  REGION 1..1127: note = Category: MG91 effectors
  REGION 1..1127: note = Description: MG91-178 effector
  source 1..1127: note = uncultivated organism sequence
MSKKILSLDLGITSIGYSVLEEVSENRYSLLDYGLSMFDKPTDKDGNSKKLLHSAASSTKNLYTLRKKRKKSLAKLFELSDISTSSKLLNQEKENLYINKWELRAKEAFCRRLEVGELFTIFYALAKHRGYKSLESGDLLEELCEELKIEYNFTKKKEDEDKGKIKLALKTVESLRLENPHKTVAQIIYEEEILKSTPTFRNHDNYNYMIRREYINDEIKKILLAQEKFGFFKSDFDVTAFIKRVIETIDDQKESTIDLSLFGNCEYYPKYKVAHQYSLLSDIFKMYESVSNITFNTKPTLKITPSQIKVIAEDFFAKVKKGKSIGEVKYKDIRKILQLGDDVKIFNKEDSYLRAGKKIENIIIKFHFVNSLSKIDNSFILNALEDERGYEVLQKIFDVLAYEKSPKSIYEKLKNLVDEKTIIVLIQNKHGNSLNISHYAMVQFIPHFKEGLTTDEIKKILGLERKEDYSKYRKGIKYLTIAEFEKDENLEINNHPVKYVVSATLRVVKHLHSVYGAFDEIRIESTRELSQNEQTKKDIEKANRALEKEFSRITEDKEYQKIADSYGKNIKKYARKILLWEEQEYLDICSGKVIGLGEIFSNEVDLDHIIPKSLGGLSVKHNFVLAHRDTNVQKSNRLALDFVSDREAFINRVEHLFSSHKINWKKRKNLLATSLDETFQDVFESKSLRATSYIESLTAQLLKCYYPFTNKKKQLDGSAVRHIQGRATSNIRKLLGVKTKVRDTNIHHAIDALLIGFTNHLWLQKLSNTFRENMGLIDDEARAKIKKEFPIIELVVNDEVEYLEPKELCDRIENAFNSYGEESVFYKDVWGKNRVVSFWVSKKPMVSKIHKDTIYEKKKDGIFTVRESILNKFIGLKITPTMSSQKFTDIFNKNILEKMYLFKVNPKDFICVVIQKRADEIAELLGSLEALDKKDKERVSKAKVDLEALIHKEILDNNGNSIRKVKFFQTNLTGFDVRGGLATKEKTFIGFRTWLKEGKLNYERIDVANLQKIEKLNDSSFKVYKNDEIFFIMPDGSRRGGKIVSFLEETKKSAFQNAKYPTSSEYQPMPFCKMNKGKKSGAKQQSIGKAIGIIKLNLDIIGNIKSYQVIGDAKSDFLDFVKESIRG

SEQ ID NO: 2987 - protein, 1351 aa, unidentified
  REGION 1..1351: note = Category: MG91 effectors
  REGION 1..1351: note = Description: MG91-179 effector
  source 1..1351: note = uncultivated organism sequence
MKYYLGLDMGTDSVGWAVTDEHYNIVRAKGKDLWGIREFEEAKTAADRRIQRTSRRRLEREKARIGLLKDYFKDEIDKVDPSFYARLDNSFLKIEDKAEEVQYKNILFNDEDFTDRDYYKKYPTIFHLISELIHNTTPHDVRLVYLACLNIFKHRGNFLNPALSKDNTRIDISDKYTELRQALSEQTNIILSEEFNENSFKAIMCDSSKSRTLKYEGLKDLFSIEKSDKQKQEILKAIAGLKVNAKNIFDLDTEEKIEFSFYEGNFDDKAAELEKEMGEDFFNIIALMKEIYDACEWDTVMAGYEYLSDSRVASYEKHKKDLVILKRAFRNNKSKDDYERFFRTDEDGTYGDYTGSNNSREKHRRRGSKHRQEDFYDSVKKEFKGLEKNGDPDIDYILTEISNGTFMPKQLTPSNGVIPFQAHYKELNAILNNASNYLGFLNDIDSESGQSVKADILQIFEFKLPYYIGPVTTKSAENGGNGWVIRRENGKVLPWNIEQKIDTKATSEAFIQRMVRKCTFLSDEKVLPKSSLLYEKFSVLNAINAISIKGERISTNIKQDLYHDKFENGKKVTKTQIVRYLNGRGLDVTENDITGIDDIITSQLSTYHRFYQIFGDDMKKDSYKNMAEDIIYLSTIFGDEKKFLKDKIKEKYGDKLSDEQIKKVLSIKCTDWGKLSKEFLELKGCRKNTGEEISLIDAMWETSLNLMELINSDEFNFNEVLNERQTKAFSSLKELKPEDLDDMYFSAPVKRMVWQTLLIIKELEQVIGSAPERVFVEVTRSHEESKRTVSREKLLLDLYKNEDKYWKDIISEASVNGRIRSKRMYLYLKQQGKDLYTGKEIPLDEVFNKGKYDIDHIYPQSLTKDDSLDNNMVLTDKSVNNHKQNIYPLEKSIRDNCYALWTALHAKGFINDEKYKRLTGNQPLTDGQLEGFIARQLVETSQGTKAICDILTQALPATKVIYSKAKVVSDFRNQYHIYKSRIANDLHHAHDAYLNVVVGNSYYVKFTDSPHRFIKERFRCDGGKYNYNLATFFESDVSNGKETAWIGSGKEYNNDNEKGTILTVRKMLAKTSPMMTRLNFVNKGSIAKEQLISADKCKKDSYLQIKVNDARLDVTKYGGYQKVSAAYFFLVESAGKKGEKIRTLETVPVYLADKIEKNPALLEQYCKDILKLNNIRISVRKIKIQSLIKRNGYFLHISGKSSNQILLRNATNIFYNQEKINYIKKIEKYVDKQEVDEEINTEKNIELYDYLTAKHNGKILLHRPNPIGEKLTKRKDKFAELSLAEQILCLYEILTSTAIVAGGAANLKQLGESPSTGVMTMNKNISKEKELLLINQSVTGIYTNTIDLLKI

SEQ ID NO: 2988 - protein, 64 aa, unidentified
  REGION 1..64: note = Category: MG91 effectors
  REGION 1..64: note = Description: MG91-180 effector
  source 1..64: note = uncultivated organism sequence
MKVEKWQADILDKRYEYLRQIYNIVQQKLVRQYIYFSQQKAYRDCKNHINDCGLEIKYNTKNYE

SEQ ID NO: 2989 - protein, 1122 aa, unidentified
  REGION 1..1122: note = Category: MG91 effectors
  REGION 1..1122: note = Description: MG91-181 effector
  source 1..1122: note = uncultivated organism sequence
MLKRILSLDLGVTSIGYSVLEEKENDKYSLLDYGVSMFDAPYNKDGNSKKLLHSQNASTSKLYHLRKKRKKDLAKLFEKFKLGKSEEFLKQEKQNRYKHKWELRGKEVFERKLDISELFTIFYFLAKHRGYKSLDSSDLLEELIEKLGLSKEEKKSKKDDEKGKIKQALRTIEDLKQKFPEKTVASIIYMIEMQKSNPTFRNHDNYNYMIRREYINEEIEKILNIQKEFGLFDKSFELDKFTKELKEIITVQKESTNDLSLFGKCEFYPEYKVAHQYSLLSDIYKMYQAVSNITFDKSKIKIKKEQIQKVANFFLKKIKSGKKISDIKYKDIRAILNLDDAVKIFNKEDNYLRKGKKQENTIVKFHFVSNLAKFDNSFILKAFEKENPYRELKEIFDVLHEEKSPKSIYEKLKDKVDKKTIIELIKNKSGNSLNISSEAIIKCIPYFEDGLTLDEIKQKLDLKRSEDYSSFKKGIKYLHVNQFEKDDKLEINNHPVKSIVSITLRLIKYLHAIYGNFDEIKVESTRELSQNEQIKEDIKKANRDLEKKIDEIVENTEYQNIANQYGKNLKKYARKLLMWEEQERLDIYSGESIGLADIFSNIVDLDHIVPQSLGGLSVKHNFVLVHRNSNLKKSNNLPINFISDKQGYINRVEHLFSEHKINWKKRKNLLAENLDEIYKDTFESKSLRATSYAEALTAQILKRYYPFTNKTKQKDGSAVKHIQGRATSNIRKLLHIKTKSRDTNIHHAIDAILIGVTNHSWLQKLSNTFRENFGVIDEVVRKNIKKAVPYIEGMELKDLVNEIEQNYNSYGEDSIFYKDIWGKTKAINFWVSRKPISSKIHKDTIYAKKPNGIFTVRENIINKFIALKITAKTKPEDFINKFEKDILKKMYLYKTNSNDVICKIVIQRAKDIQKLLVSFENLDTKDKEVMTDAKSKLNALIHSDLIDNNGNIIRKIKFVPKTSPKDGFDIRKGKAISEKTFIGFKTYLEKDKLKYNRIDISNTQKINGKFVVYSKGFKVFKNNLVFFIFSDGTYKGGKIVSFLADKGIAAFSNSKFPASIANQPHSFLTFFNGKPNSHKQHSINKAIGLIKLDLDILGNIKSQQTIGNVQSKLFDFIKEILK

SEQ ID NO: 2990 - protein, 1116 aa, unidentified
  REGION 1..1116: note = Category: MG91 effectors
  REGION 1..1116: note = Description: MG91-182 effector
  source 1..1116: note = uncultivated organism sequence
MKQILSLDLGITSVGYSVIQEHETDKYSLIDYGVSMFDKPTDKDGNSKKLLHSQALSAKNLHKLRKKRKQNLASLFEKYHLDNRERLLQQEKDNLYKNKWELRAKKVFEKQLSIGEIFTILYHIAKHRGYKSLDSGDLLEELCETLGIETETTKPKKDDERGQIKQALKSVEALREEYPQKTVAQIIYELESKKENPIFRNHDNYNYMIRREYINDEIRKIIKVQIAFGAFRTIDDAFINDVIAVIDDQKESTNDLSLFGKCEYYPEYYVAHQYSLLSDIFKMYQAVANITFNKEKIKITKEQIALIAEDFLGKIKKGKSVKDIKYKDIRKVLKLDDDIKIFNKDDSYLNKGKKQENTITKFHFVDILSKIDKSFVEDIFASDKSYTIMREIFDVLHYEKSPKLIYKQLKNKISDEQVIIDLIRNKKGNSLNISSFAMLQLLPYLKEGLTLDEVKQKLGLQRQEDYAEYKKGIKYLHITNYEKDDELEINNHPVKYAVSAALRVVKHLHTEYGTFDEIKVESTRELSLGEKARKEIEKANKAFEKEIEQIVENVEYQKIAKSYGKNLRKYARKILMWEEQERLDIYSGKSIGITDIFSNSVDLDHIVPQSLGGLSVKHNFVLVHRDENLQKSNQLPMNYIKDTQAYTNRVEHLLREHKINWKKAKNLLATNLDEVFKDRFESKSLRATSYIEALTAQMLKRYYPFKDVRKLKDGSAVRHLQGRATSNIRKVLGVKTKSRETNIHHAIDALLIGVTSHSWLQKLSNTFRENFGCIDDEARKNIKKALPYMDGLEIKDLVKEIEEQYNSFGEDSIFYRNIWGKVKTVNFWVSKKPMSSKVHKDTIYAKKGDGIYTVRENIIAKFIGLKVIPTTSPEEFMKRFHKNILQKMYLFKTNPHDVICKLVEQRGEEIKELLWSFEFLDVKNKEEMSEAKTKLELLIHKDLLDNNGNVIRKVKFYQTNLTGFDVRGGLATKEKTFIGFRAYKENEKLEYERIDIANIEKIQKVNDGSFKAYKNDVVLFIFDDKVYKGGKIVSFLEEKKMAAFSNPKYPANIQSQPESFLTMFNGKANSHKQVSISKAKGIIKLYIDILGNIKSYQVLGNAKSKILDEIKSIVSH

SEQ ID NO: 2991 - protein, 1136 aa, unidentified
  REGION 1..1136: note = Category: MG91 effectors
  REGION 1..1136: note = Description: MG91-183 effector
  source 1..1136: note = uncultivated organism sequence
MQEEEIMSKKILSLDLGTTSIGYSILNEMDNDRYALIDYGISMFDKATDKDGKSKKLLHSASQSSANLHDLRKERTQNLAMLFEKYKLGRVDALLEQERENRYTDKWYLRAEKAFSEKLETEELFTVLYLMAKHRGYKSLDTDDLLEELLLDLGFEVEEKKEKDAEKGKIKQALKAVESFRQKYPEKTVARIIYEIEIKKDNPTFRNHDNYNYMIRREYINEEIRKIVQAQSKFGLFAKDFDVEVFIKELIVTIDDQKDSTNNLSLFGNCEYYSEHKVAHQYSLLSDVFKMYQSVANITFRKIKITKEQIQIIADDFFKKIQIGKNIADIKYQDIRKLLKLGEGVQVFAKEDYHLDKKGKKVHHTITKFHFLANLSKIDNRFIKSAFEKENKFEILKEIFDVLEFEKAPRGIYIQINEIFMKHKLVDDERLKDETIINLIKYKSGSSLNISAYTMIKFIPYFEKGMTSDEIKQVLKLERNEDYSNYKKGIKYLHTTNFEKDDNLEINNHPVKYVVSATMRLVKHLHATYGAFDEIRVESTRELSQNEETKKAIEKANRENEVKFQKIIENEEYIKIANHYNKNLKRYARKLTLWEEQEKLDIYTGKTIGFEDIFTNAVDIDHIIPQSLGGLSVKHNLVLAHRDDNVKKSNQLPMNFVKDKVDYVNRIEYLFKEYKINWKKKINLLATTLDERYKDTFESKELRATSYIEALTAQMLKRYYPFPDKKKQANGQAVAHVQGRATSNIRKLLGVKIKVRDTNIHHAIDAILIGLTNKSWLQKLSNTFRENMGVIDDRARANIKKEIPLIEGIDPKELVELIEDAYNVYGEESVFYKDIFGKTKAVNFWVSKKPMSSKIHKDTIYAKKPNGLFTVREDIIKQFIALKITTTTDSELFMKAFEKKILQKMYLFRTNPNDVICRIVKSRGDELKSLLQSFVGVDTKDKEIMAEAKEKLDALMHKELLDNNGNTIRKIKFYQSNLTGFDIRGGLATKEKTFIGFKAVLEKEKLVYERIDASNFKRIKKENDASFKVFKNDVVFFVFSDNTFRGGKLVSFLEDGTIASFQNPRYPAAVQFQPSLFCILGKDKEGNPKKSSSKQYKNGKAIGIIKLNLDILGNIKSYSKFGEVSQEVEKSIFHKE

SEQ ID NO: 2992 - protein, 1104 aa, unidentified
  REGION 1..1104: note = Category: MG91 effectors
  REGION 1..1104: note = Description: MG91-184 effector
  source 1..1104: note = uncultivated organism sequence
MKKILSLDLGITSIGYSILEKKQNNHYTLIDYGVSMFDSPFDKDGKSKKLLHSTNTSMSNLYAKRKQRKKALAKLFEEFGLEKAHKLLQQEKQNIYKNKWQLRCDDVFTRELSVGEFFTILYFIAKHRGYKSLDTNELLEELCEELKLNCEMKSSKKDDEKGKIKQALKRVEELKQNTNKTVAQIIYELELQKQTPTFRNHDNYNYMIRREYIEDELKKLVDAQQHFFKNNKDEFFEKLKEIIIKQDESSNDLNLFANCEYYKEHKVANQYSVVADIFKMYESVANITLNKEKITKEQIKLIADDFFIKIKKGKNIADIKYKDIRKILKLSDDIKIFGKSDSYVSKGKTIHNTIIKFHFLNNLSKFDNSFIVQNLDNLEKLAEIFEVLNKEKSPKTIFEKLNGNVDEKTIIKLIRYKSGKSLNISHYAMLKFIPYFQEGLTTDEIKQKLDLNRCEDYLAYKKGIKYLHINQFEKDDNLEINNHPVKYIVSAVMRVVKHLHTLYGAFDEIKVESTRELSLDDKTRKDIQKANQEFEKKLDDIKQNSQYQQIAQEYDKNLSKYTKKILMWQEQDRVDIYSGKTIGLNEIFSNEVDIDHIVPQSIGGLSVKHNLVLVHRDTNLQKSNQLPMNFVADKVGLKNRVEKLFSEHKINFKKMKNLLATNLDEIYKDSFESKSLRATSYIEALTAQMLKRYYPFADKQKQKDGSAVRHIQGRATSNIRKLLHVKTKVRDTNIHHGIDALLIGVTSHSWLQKISNTFRENFGVIDDKARERVKKELPLIEGVSVAELVAHIEENYNIYGEESVFYKDVFGNVRVVPFWVSKKSMVSKIHKDTIYAKKQNGIFTVREKILNKFISLKITPKTSSDEFMKKFKKEILEKMYLYKTNPKDKICAIIEQRAFEIAKLLDSLQLKDTTDKEMLSETKKYLDEFIHQDLKDYNGNVIRKVQFYQTNLTGFEIRGGLATKEKTFIGFSAILNGKKIKYKRIDVANFESMKKVDGFKVYKNDVVFFIYPDGSFNGGKIVSFLEDKKMASFSNPRFPANIGLQPHSFVTLFKGKANSHKQHSLNKAIGIIKLNLNVLGNIKSFSSMDEVDGELLEFLKGLKG

SEQ ID NO: 2993 - protein, 484 aa, unidentified
  REGION 1..484: note = Category: MG91 effectors
  REGION 1..484: note = Description: MG91-185 effector
  source 1..484: note = uncultivated organism sequence
MAHKENQKAFVVTFPLRTEKWQEDRIDKMMRMLTTFYNDRQRKLVRRYIYLSHSKAYKEAKGKGVVAFKNYMKENGFSQYGLDAFFKADTKGALYQCGLNSMFLQYLSLCAWSAWDKKLFGKGDFVKTDKVVNIFCSRNKKERFCGFDYDLSTFTISIKSTCTKKIICTIPFVVNKKSDYELFALSQRICRIGIVRKLIRGKYKYYVQFTFDGVPYHKGRNIGTGIVGIDPGPSKIAIVGDNKVEIAKLAPNIEEDERKTARLKRKLDRSRRATNPHMYKEDGTIIKGQRQTCFSKVYNETRKQLADAQRKLAAKRKIAHNELANTLLEYGDTFKVEANSYKSMQARAKATSMTKLGRIRSKKRYGKSIMNRAPSEFLVILKNKLLYYPKGKYYDVPSSYACTQFDFTNESFTEHKISERRIVTSDGIQHNRDTLAAFNIKNAIVNDTSTKKKKVTKSKEFFDIVRMKASYNEFCLMERYLLSV

SEQ ID NO: 2994 - protein, 1126 aa, unidentified
  REGION 1..1126: note = Category: MG91 effectors
  REGION 1..1126: note = Description: MG91-186 effector
  source 1..1126: note = uncultivated organism sequence
MSKKILSLDLGITSIGYSILEELNNDRYSLIDYGVSMFDKPTDKDGKSKKLLHSASVSAKKLHTLRKERKTNLAQIFEDYKLSNKTTLLNQEKQNIYTNKWELRAKKAFEEKLEISELFTIFYVLSKHRGYKSLDSDDLLEELCQKLGIEVDTKKATKEDDEKGKIKKALQTIENLRIKYPDNTIAQIIYETEILKENPTFRNHDNYNYMIRREYINDEITKIIKAQNGFKAFNFDVDEFIEAIINTIDDQKDSTNNMDLFGNCEYYKEEKVAHQYSLLSDIFKMYQSVSNITFNIAELCEVNPLQKNIKIQKEQIKLIADDFFTKIKKGKNIADIKYKDIRKVLKLSDDFKIFNKEDSYLNKGKKQENTITKFHFVNNLSKIDNSFILNALKQDNRYEILREIFDVLSQEKAPHSIYEKLKDKVDDKTIISLIKYKNGNSLNISHHAMIKFIPYFEEGLTTDEIKQKLGLDRKEDYSEFKKGIKYLHIKTFEKDNNLDINNHPVKYVVSATLRVIKHLHTTYGAFDEIRVESTRELSQNEQTKKDIEKANRALEKEINNIVENKEYQKIADSYGKNLKKYARKILMWEEQNRLDIYSGKNIGFEDIFTNSVDLDHIVPQSLGGLSVKHNFVLVHRDTNLQKSNQLPINFIKDKQEFINRVEYLFSEHKINWKKKINLLANNLDEVFKDSFESKSLRATSYIEALTAQVLKRYYPFPNEKKQNDGSAVRHIQGRATSNIRKLLHVKTKVRDTNIHHAIDAILIGLTNASWLQKLSNTFRDNMGVIDDEARAKIKKEMPLIEGIEPKELVEMIEDRYNEFGEDSIFYKDIFSNVKAVNFWVSKKPMVSKIHKDTIYAKKQDGIFTVREGIINKFVGLKTTTTTSPSKFMESFEKNILKKMYLHKTNPKDAICQIVQKRANEIAILLESFVDLDTKNKELMSDSKVKLDELFHSDMLDNNGNVIRKVKFFQTNLTGFEIRGGLATKEKTFIGFKATLKDSKLKYTRIDVANFEKIQKENTDSFKVFKNDLVFFIYSDGSFRGGKIVSFLEEKGMGAFSNSRFPASIGLQPHSFLTMFNGKANSHKQISLNKAIGIIKLNIDIIGNIKSYQVIGDVKGELLEFIKKLTQ

SEQ ID NO: 2995 - protein, 1122 aa, unidentified
  REGION 1..1122: note = Category: MG91 effectors
  REGION 1..1122: note = Description: MG91-187 effector
  source 1..1122: note = uncultivated organism sequence
MLKRILSLDLGITSIGYSVLEEKENDKYSLLDYGVSMFDAPYNKDGNSKKLLHSQNASTSKLYHLRKKRKKDLAKLFEKFKLGKSEEFLKQEKQNRYKHKWELRGKEVFERKLDISELFTIFYFLAKHRGYKSLDSSDLLEELIEKLGLSKEEKKSKKDDEKGKIKQALRTIEDLKQKFPEKTVASIIYMIEMQKSNPTFRNHDNYNYMIRREYINEEIEKILNIQKEFGLFDKSFELDEFTKELKEIITVQKESTNDLSLFGKCEFYPEYKVAHQYSLLSDIYKMYQAVSNITFDKSKTKIKKEQIQKVANFFLKKIKSGKKISDIKYKDIRAILNLDDAVKIFNKEDNYLRKGKKQENTIVKFHFVSNLAKFDNSFILKAFEKENPYRELKEIFDVLHEEKSPKSIYEKLKDKVDKKTIIELIKNKSGNSLNISSEAIIKCIPYFEDGLTLDEIKQKLDLKRSEDYSSFKKGIKYLHVNQFEKDDKLEINNHPVKSIVSITLRLIKYLHAIYGNFDEIKVESTRELSQNEQIKEDIKKANRDLEKKIDEIVENTEYQNIANQYGKNLKKYARKLLMWEEQERLDIYSGESIGLADIFSNIVDLDHIVPQSLGGLSVKHNFVLVHRNSNLKKSNNLPINFISDKQGYINRVEHLFSEHKINWKKRKNLLAENLDEIYKDTFESKSLRATSYAEALTAQILKRYYPFTNKTKQKDGSAVKHIQGRATSNIRKLLHIKTKSRDTNIHHAIDAILIGVTNHSWLQKLSNTFRENFGVIDEVVRKNIKKAVPYIEGMELKDLVNEIEQNYNSYGEDSIFYKDIWGKTKAINFWVSRKPISSKIHKDTIYAKKPNGIFTVRENIINKFIALKITAKTKPEDFINKFEKDILKKMYLYKTNSNDVICKIVIQRAKDIQKLLVSFENLDTKDKEVMTDAKSKLNALIHSDLIDNNGNIIRKIKFVPKTSPKDGFDIRKGKAISEKTFIGFKTYLEKDKLKYNRIDISNTQKINGKFVVYSKGFKVFKNNLVFFIFSDGTYKGGKIVSFLADKGIAAFSNSKFPASIANQPHSFLTFFNGKPNSHKQHSINKAIGLIKLDLDILGNIKSQQTIGNVQSKLFDFIKEILK

SEQ ID NO: 2996 - protein, 1129 aa, unidentified
  REGION 1..1129: note = Category: MG91 effectors
  REGION 1..1129: note = Description: MG91-188 effector
  source 1..1129: note = uncultivated organism sequence
MKKLLSINLGITSIGYSVLNEQDNDKYSLIDYGVNMFDTPYDKDGNSKKLIHSQIKSTKKLYELRKERKKNLSKLFEDFGFAKKEDFLNQEKENLFINKWGLRAKKAFEEKLTFQELFSILYLIAKHRGYKSLDTDDLLEEFCEKLGLNQEKKKDNGKDNEKGKIKQALKTIETLKLQFPQKTIPQIIYEVEIQKENPTFRNHDNYNYMIRREYINEEIKALVLSQEKFGLFDKNFDSKAFIEKLIETIDDQKESSNDLSLFGNCEYLKNEKVAHQYSLLGDIYKMYQSVANITFNSNPTIKISKEQIKLIANDFFDKLKNGKNISDIKYKEIRKILKLSDDFKVFNKEDSYKSKDKTQENSITKFHFVNNLSKFDKDFIKSILEKSNKYDILKEVFDVLRDEKQPKPIYDKLNNIFSKYDLIKNESIKNNTILELIKNKTGSSLSISHQAMINIIPYFEDGSTIDEIKQKLNLSREEDYLSYKKGIKYLSVAQFENNNNLPINNHPVKYVVSAALRLIKHLHVTYGAFDEIRVESTRELSLNDESKRNIDKVNRENEAKITAILENIEYQQIAQTYGKKLEKYARKILIWDEQERFDIYNGKSIGFGDIFSNSVDIDHIVPQSLGGLSVKHNLVLVHRDTNLQKLNQLPLNFIADKQGFIDRIEYLFKEHKISWKKRKNLLATNLDDTYKDTFESKSLRATSYIEALTAQILKSYYPFPNQTKNSMEVRHIQGRTTSNIRKLLKVKTKIRNTNIHHAIDAILIGLTNQSWLQELSNTFRENMGVIDDVARQNIKKVIPLIEGIEPKELIEMIENNYNAYGEDSIFYKDIFGKTKAVNFWVSKKPMVSKIHKDTIYSKKPNDFYTVKENILNQFIALKVNNDTKANKFYEDFKKNILEKMYVYKTNPNDVICKIVQNRAYDIKELLTSFETIDKKDKEALSEAKQKLDTLIHNPLLDNNNKPIRKVKFYQTNLTGFNIRGGLATKEKTFIGFKASLKNDKLFYERIDVANKNNIKDNDFLIIRNNLICINFKNKNLLGFVESFDENTNKIRMYDSRYPKRLENQPERFKVASGKGRKEFGIAGAIGIIKLNLDILGNINSYQIIGTIQNELYSFFKKLKNDKGNLPINT

SEQ ID NO: 2997 - protein, 1129 aa, unidentified
  REGION 1..1129: note = Category: MG91 effectors
  REGION 1..1129: note = Description: MG91-189 effector
  source 1..1129: note = uncultivated organism sequence
MEKIMNKKILSLDLGITSIGYAILNEIDNDRYELVDYGVSMFDKATDKDGKSKKLLHSASQSSANLHGLRKIRTKNLASLFEKYNLGNAVDFLRQERENTYIDKWYLRAEKSFTEKLKIEELFTILYLMTKHRGYKSLDTDDLLDELLVELGFEVEAKKEKDAEKGKIKQALKTVESYRKKYPAKTVARIIYEIEIKKENPTFRNHDNYNYMIRREYIREEIKKIVLAQNEFGLFTKDFDVDSFIEELIATIDDQKDSTNDLSLFGNCEYYSEHKVAHQYSLLSDIFKMYQSVANITLNKTKITKEQIKIIADDFFKKIEKGKNIADIKYQDIRKVLKLNDEVKIFGKEDYHLNKKSIKVHHTITKFHFLSSLGKIDNTFIKSTFTKENKLEILQEIFDVLEFEKAPKSIYNQLNEIFGKYVLVEDESVKNKTIINLIKYKSGNSLNISAYAMRKFIPYFEKGMTSDEIKQELKLERNEDYSNYYKGIKYLHVNQFEKDDNLEINNHPVKYVVSATMRLVKHLHATYGAFDEIRVESTRELSQNEETKKAIDKANKANEKKFQEIVENEEYQKIANHYNKNLKKYARKIMLWEEQEKLDVYTGKTIGCEDIFTNVVDIDHIIPQSLGGLSVKHNLVLAHRDENVQKSNQLPMNFVKDKKAYENRIEHLFKEYRINWKKKINLLATTLDEAYQDTFESKALRATSYIEALTAQMLKRYYPFLDKKKQANGQAVAHVQGRATSNIRKLLDVKIKVRDTNIHHAIDAILIGLTNKSWLQKLSNTFRENMGVIDDEARANIKKEIPLIEGVEPKELVELIEDAYNIYGEESVFYKDIFGKTKAVNFWVSKKSMSSKIHKDTIYAKKPNNLFTVREDIIKQFIALKITVTTDSETFMKAFEKKILQKMYLFKTNPNDVIVKIVNHRGNELKSLLQSFVNIDIKNKEVMSEAREKLDTLIHQKLVDNNGNIIRKVKFYQSNLTGFDIRGGLATKEKTFIGFRATSNNEKLFYERIDASNFKRIQKENDGSFKVYKNDVVFFIYEDEIFKGGKIVSFLEDKKIASFSNPRYPASIKFQPHSFLTLFKGIPNSHKQYSLNKAIGIIKLNLDILGNIKSYSKFGVVSKEVELKIFHKE

SEQ ID NO: 2998 - protein, 53 aa, unidentified
  REGION 1..53: note = Category: MG91 effectors
  REGION 1..53: note = Description: MG91-190 effector
  source 1..53: note = uncultivated organism sequence
MAKETFVLTLPLKVEKWQADILDKRYELLRQTYKYGATEIGTSVHLLRSTERI

SEQ ID NO: 2999 - protein, 348 aa, unidentified
  REGION 1..348: note = Category: MG91 effectors
  REGION 1..348: note = Description: MG91-191 effector
  source 1..348: note = uncultivated organism sequence
MILSFNINGKKNSKAKKIILPINVKNLTEYEMYALKDGYDSINVVTIIRKMIRGKYKYYVQFTIKGEKPQKGRTLGKGNVGIDIGPSTVAISSLNGVTIDTLAEKCNNIEDKISDIERKMDRSRRATNPQNFTEDGQIKRINRKKGEIREWKYSKRYVKLNNKKRELLRKQSAIRKLQHNIKANEVLSLGDTFIVENNPISAWAKRAKGVRKNKNGKIQTNKRFGKSIGNRAPSMFVTILQNKVKSLKGKFVPVNPKNAASRFDFTNGDFTEHNLDERKITLSNGNTHQRDMLAAFNLQHIDLTNDDLKKYNVDEMIEDYPIFCKLEKQEIKRFINGMKISNKSNIGI

SEQ ID NO: 3000 - protein, 1104 aa, unidentified
  REGION 1..1104: note = Category: MG91 effectors
  REGION 1..1104: note = Description: MG91-192 effector
  source 1..1104: note = uncultivated organism sequence
MKKILSLDLGITSIGYSILEKKQNNHYTLIDYGVSMFDSPFDKDGKSKKLLHSTNTSMSNLYAKRKQRKKALAKLFEEFGLEKAHKLLQQEKQNIYKNKWQLRCDDVFTRELSVGEFFTILYFIAKHRGYKSLDTNELLEELCEELKLNCEMKSSKKDDEKGKIKQALKRVEELKQNTNKTVAQIIYELELQKQTPTFRNHDNYNYMIRREYIEDELKKLVDAQQHFFKNNKDEFFEKLKEIIIKQDESSNDLNLFANCEYYKEHKVANQYSVVADIFKMYESVANITLNKEKITKEQIKLIADDFFIKIKKGKNIADIKYKDIRKILKLSDDIKIFGKSDSYVSKGKTIHNTIIKFHFLNNLSKFDNSFIVQNLDNLEKLAEIFEVLNKEKSPKTIFEKLNGNVDEKTIIKLIRYKSGKSLNISHYAMLKFIPYFQEGLTTDEIKQKLDLNRCEDYLAYKKGIKYLHINQFEKDDNLEINNHPVKYIVSAVMRVVKHLHTLYGAFDEIKVESTRELSLDDKTRKDIQKANQEFEKKLDDIKQNSQYQQIAQEYDKNLSKYTKKILMWQEQDRVDIYSGKTIGLNEIFSNEVDIDHIVPQSIGGLSVKHNLVLVHRDTNLQKSNQLPMNFVADKVGLKNRVEKLFSEHKINFKKMKNLLATNLDEIYKDSFESKSLRATSYIEALTAQMLKRYYPFADKQKQKDGSAVRHIQGRATSNIRKLLHVKTKVRDTNIHHGIDALLIGVTSHSWLQKISNTFRENFGVIDDKARERVKKELPLIEGVSVAELVAHIEENYNIYGEESVFYKDVFGNVRVVPFWVSKKSMVSKIHKDTIYAKKQNGIFTVREKILNKFISLKITPKTSSDEFMKKFKKEILEKMYLYKTNPKDKICAIIEQRAFEIAKLLDSLQLKDTTDKEMLSETKKYLDEFIHQDLKDYNGNVIRKVQFYQTNLTGFEIRGGLATKEKTFIGFSAILNGKKIKYKRIDVANFESMKKVDGFKVYKNDVVFFIYPDGSFKGGKIVSFLEDKKMASFSNPRFPANIGLQPHSFVTLFKGKANSHKQHSLNKAIGIIKLNLNVLGNIKSFSSMGEVDGELLEFLKGLKG

SEQ ID NO: 3001 - protein, 1129 aa, unidentified
  REGION 1..1129: note = Category: MG91 effectors
  REGION 1..1129: note = Description: MG91-193 effector
  source 1..1129: note = uncultivated organism sequence
MKKLLSINLGITSIGYSVLNELDNDKYSLIDYGVNMFDTPYDKDGNSKKLIHSQIKSTKKLYELRKERKKNLSKLFEDFGFAKKEDFLNQEKENLFINKWGLRAKKAFEEKLTFQELFSILYLIAKHRGYKSLDTDDLLEEFCEKLGLNQEKKKDNGKDNEKGKIKQALKTIETLKLQFPQKTIPQIIYEVEIQKENPTFRNHDNYNYMIRREYINEEIKALVLSQEKFGLFDKNFDSKAFIEKLIETIDDQKESSNDLSLFGNCEYLKNEKVAHQYSLLGDIYKMYQSVANITFNSNPTIKISKEQIKLIANDFFDKLKNGKNISDIKYKEIRKILKLSDDFKIFNKEDSYKSKDKTQENSITKFHFVNNLSKFDKDFIKSILEKSNKYDILKEVFDVLRDEKQPKPIYDKLNNIFSKYDLIKNESIKNNTILELIKNKTGSSLSISHQAMINIIPYFEDGSTIDEIKQKLNLSREEDYLSYKKGIKYLSVAQFENNNNLPINNHPVKYVVSAALRLIKHLHVTYGAFDEIRVESTRELSLNDESKRNIDKVNRENEAKITAILENIEYQQIAQTYGKKLEKYARKILIWDEQERFDIYNGKSIGFGDIFSNSVDIDHIVPQSLDGLSVKHNLVLVHRDTNLQKLNQLPLNFIADKQGFIDRIEYLFKEHKISWKKRKNLLATNLDDTYKDTFESKSLRATSYIEALTAQILKSYYPFPNQTKNSMEVRHIQGRTTSNIRKLLKVKTKIRNTNIHHAIDAILIGLTNQSWLQELSNTFRENMGVIDDVARQNIKKVIPLIEGIEPKELIEMIENNYNAYGEDSIFYKDIFGKTKAVNFWVSKKPMVSKIHKDTIYSKKPNDFYTVKENILNQFIALKVNNDTKANKFYEDFKKNILEKMYVYKTNPNDVICKIVQNRAYDIKELLTSFETIDKKDKEALSEAKQKLDTLIHNPLLDNNNKPIRKVKFYQTNLTGFNIRGGLATKEKTFIGFKASLKNDKLFYERIDVANKNNIKDNDFLIIRNNLICINFKNKNLLGFVESFDENTNKIRMYDSRYPKRLENQPERFKVASGKGRKEFGIAGAIGIIKLNLDILGNINSYQIIGTIQNELYSFFKKLKNDKGNLPINT

SEQ ID NO: 3002 - protein, 1137 aa, unidentified
  REGION 1..1137: note = Category: MG91 effectors
  REGION 1..1137: note = Description: MG91-194 effector
  source 1..1137: note = uncultivated organism sequence
MKKILSLDLGITSMAYSIIEEFENDRYSLVDYGVSMFDKPTDKDGNSKKLLHSASTSTKNLYNLRKKRKQNLAKLFENFNLSTKSRLLNQEKQNLYINKWELRAKKAFDERLDTTELFSIFYALAKHRGYKSLDSGDLLEELYEKLGIDFQAKKEKDKSKADEKGKIKSALSTIENLRLEHPQKTVAQIIYEVELQKKNPTFRNHDNYNYMIRREYINDEIKKIILSQKEFGFFSDGFNVEEFSKRVVETIDDQKDSTSDMSLFGFCEYYKDKEQRVTHQYSLLSDIYKMYESVSNITFNSKPSIKITPQQIKLIANDFFTKVKKGKNILDIKYKDIRKILNLDDNFKIFNKDDTYLNRGKKQEHIIIKFHFVNTLSKINNQFILDIFEQENKYELLKDIFDVLCFEKAPHAIYEQLKEKIKDEKTIVDLIKYKSGNSLNISHYAMLKFIPYFEQGLTADAIKKKLGLNRKENYSAFKKGIKYLHINKFEEDDNLKINNHPVKYVVSSTLRVIKHLHSVYGAFDEIRVESTRELSQNEQTKKDIEKANRAFEKELDIIIEDVEYQKIAEQYGKNLRKYARKILIYKEQERRDIYTGEGIELKDIFTNVVDLDHIVPKSLGGLSVKHNLVLAHRDSNVRKSNQLPLYFVKDKQSFINRVEYLFEHHKINWKKKKNLLASALDETFQDTFESKSLRATSYIEALTAQVLKRYYPFPNKKKQSDGSAVRHIQGRATSNIRKLLGVKTKVRDTNIHHAIDAILIGFTNQSWLQKLSNTFRENMGLIDDEARANIKKEMPIVELIVNDKVEYLKPKELCQRVEESYSEFGEDSVFYRDVWGEVKVVNFWVSKKPMVSKIHKDTIYSKKQDGIFTVRESIINKFILLKITPTTPSQKFIENFQKNILKKMYLFKTNPKDIICQIVQNRAKSIATLLDTFKDIDSKNKELMSDAKTKLEELIHKDLVDNNGNTIRKVKFYQSALTGFDIRGGLATKEKTFIGFRAWLESDKLQYERIDVANFDTIKKKFDNSFRVFKNDVVFFVYPDGSFRGGKIVSFLDDKGIASFSNPKYPSLSEHQPKSFCKMGKDNNGNPKKSGAKQQNINASIGLIKLSLDIIGNIKSYQVTGNAESELLRFIKDVKNG

SEQ ID NO: 3003 - protein, 1117 aa, unidentified
  REGION 1..1117: note = Category: MG91 effectors
  REGION 1..1117: note = Description: MG91-195 effector
  source 1..1117: note = uncultivated organism sequence
MKKILSFDLGITSIGYSVLTEDEAQKYSLLDYGVSMFDKPTDKDGNSKKLLHAQALSTKKLYKLRKERKKNLALLFEKYALAKASKLLEQEKKNLYMYKWQLRAKKVFEERLSIGEIFTILYHIAKHRGYKSLDSGDLLEELCVELGIKIDVKKEKKDDEKGKIKQALSTIESLRKEYPKKTVAQIIYEVELQKERPVFRNHDNYNYMIRREHINDEIATIIRKQKEFGNFENIDSEVFIVDIIAAIDDQKESTNDMSLFGKCEYYPKEHVAHQYSLLSDIFKMYQAVANITFNKEKIKITKEQIRLLTEDFLNKIKKGKSVKELKYKDVRKILKLDESVKIFNKEDSYQRAGKKVEHTITKFHFVDNLSKIDKSFIEDIFNADESYVLMREIFDVIHKEKSPKRIYEQLKSKVSSEAVIIDLIRYKKGSSLNISSYAMAKFLPYFEEGMTLDAIKEKLDLGRKEDYSVYKKGIKYLHISTYEKDDDLEINNHPVKYVVSAVLRVVKHLHAKHGTFDEIKVESTRELSLNDKVKKEIDKANKAREKEIEKIISNDEYQKIAKEYGKNIHKYARKILMWEAQERFDVYSGKSIGIDDIFSNRVDVDHIVPQSLGGLYVQHNLVLVHRDENLQKSNQLPMNYITDKEAYINRVEHLFSEHKINWKKRKNLLASNLDEIYKDTFESKDLRATSYIEALTANILKRYYPFIDEKKSVDGSAVRHIQGRATANIRKVLGVKTKSRESNIHHGVDALLIGVTNPSWLQKLSNIFRENFGKIDDEARKNIKKALPYIDGVEVKDIVKEIEQKYNSYGEDSIFYKDIWGKAKTVNFWVSKKPMISKVHKDTIYADKGNGIFTVRESIIAKFINLKITPTTFPEDFMKKFHKEILEKMYLYKTNSNDVICKIVQQRAEEIKELLWSFEFLDVKNKEEMQEAKANLESLVHRELFDNNGNVVRKVKFYQTNLTGFKVRGGLATKEKTFIGFRAFKKDKKLEYKRIDVSNFEKIKKSNDGSFKVYKNDIVFFVFDEEKYKGGKIVSFLEDKKMAAFSNPKYPANIQAQPESFLTIFKGKANSHKQVSVGKAKGIIKLKVDILGNIESYQVLGNAKSKLLDEIKSIVSH

SEQ ID NO: 3004 - protein, 1126 aa, unidentified
  REGION 1..1126: note = Category: MG91 effectors
  REGION 1..1126: note = Description: MG91-196 effector
  source 1..1126: note = uncultivated organism sequence
MSIATKNGHIMKKILSLDLGTTSIGYSVITEKETQKYSLLDYGVSMFDKPIDADGNSKKLLHSQALSAKKLHKLRKKRKQNLAKLFEYYRLDSAVKLLKQEYENRYIHKWQLRAKKVFEEKLSIEEIFTIFYHIAKHRGYKSLDSGDLLEELCIELGIELEQKKEKKDDEKGKIKQALNTIESLRQEYPQKTVAQIIYEVELQKEQPVFRNHDNYNYMIRREYINDEIATIIRKQKEFGNFENIDSEAFISDLIAVIDDQKESTNDMSLFGKCEYYSDEYVAHQYSLLSDIFKMYQAVANITFNKEKIKITKEQIKLIAEDFLNKIKKGKSIKELKYKDVRKVLNLDDSVKIFNKEDSYQRAGKKVEHTITKFHFVDTLSKIDKSFIEDIFNADNSYALMREIFDVVHKEKSPKRIYEQLKDKVSSEAVIIDLIRYKKGSSLNISSYAMVKFLPYFEEGMTLDTIKEKLKLNRKEDYSEYKKGIKYLHISTYEKDDSLEINNHPVKYVVSAALRVVKHLHAKYGAFEEIKVESTRELSLNDKVKKEIEKANKEREKEIEKIISNKEYQKIAQEYGKNIHKYARKILMWKAQERFDIYSGKSIGLDDIFSSRVDIDHIVPQSLGGLYVQHNLVLVHRDENLQKSNQLPMNYIEDKEAYVNRVEHLFSEHKINWKKRKNLLATNLDEIYKDTFESKDLRATSYIEALTANILKRYYPFTDEKKLADGSAVRHIQGRATSNIRKVLDVKTKNRESNIHHSVDALLIGVTNHSWLQKLSNTFRENFGKIDDEARENIKKSLPYIDGAEVKDIVKEIEEKYYSFGEDSIFYKDIWGKVKTVNFWVSKKPMSSKIHKDTIYAKKGDGIFTVRESIIAKFINLKTTPTTSPEDFMKKFQKEILEKMYLYKTNPNDVICKIIKQRAEEIKELLWSFEFLDVKNKEEMQEAKVKLESLVHRELFDNNSNVIRKVKFYQTNLTGFEVRGGLATKEKTFIGFRAIKKGEKLEYERIDVSNFEKMKKSNDGSFKVYKNDIVFFIFDEENYKGGKIVSFLDDKKMAAFSNPKYPANTQSQPESFLTMFQGKPKSHKQVSIGKAKGIIKLKVDILGNIESYQVLGDARSKILDDIKKYSE

SEQ ID NO: 3005 - protein, 1144 aa, unidentified
  REGION 1..1144: note = Category: MG91 effectors
  REGION 1..1144: note = Description: MG91-197 effector
  source 1..1144: note = uncultivated organism sequence
MVNLMSKKILSLDLGITSIGYSVLQEHSNDKYSLCDYGLSMFDKPLDKDGNSKKLLHSASISTTKLYALRKKRKQNLALVFENFQLASKTSLLEQEKNNQFINKWELRAKKVFEEKLEISELFTILYTLAKHRGYKSLDSGDLLEELCVELGIEIDNKGKKKEDDEKGKIKNALKTIESLREANPKKTVAQIIYEIEIQKVNPTFRNHDNYNYMIRREYINDEIKKIINTQEKFGLFSIAFNTKEFIKKIINAIDDQKDSTNDMSLFGRCQYYKEEIVAHQYSLLSDIFKMYESVANITFNAKPIVKITPKQLKLIADDFFKKIKKGKNIADIKYKDIRKILKLDDNVKIFNKEDSHFIKGKKQERSIIKFHFLNNLSKINNAFILDALEQENKYEILKKIFDVLAYEKAPHSIYEKLKEKIKDKKTIVDLIKYKAGSSMSISSYSMIQFIPHFEQGFTTDEIKKKLELDRKEDYSAFNKGIKYLHLKQFEEDDDLKINNHPVKYVVSATLRLIKYLHSVYGAFDEIRVESTRELSQNEQTKKDIEKANRALEKEIDAIVSNTEYQTIAQNYGKNLRKYARKILLWEEQERLDIYSGKVISVEDIFTNVVDLDHVVPRSLGGLSVKHNFVLAHRDTNVQKSNQLPLYFVMDKQAFINRVEYLFESHKINWKKKINLLANSLDDVYKDTFESKSLRATSYIEALTAQLLKRYYPFPDEKKQSDGSAVRHIQGRATSNIRKLLDVKMKVRDTNIHHAIDAILIGFTNQSWLQKLSNTFRENMGVIDDKARENIKKDFPIIELVINDEVKYVEPKELMELIEDNYNTFGEDSVFYKDIWGRVKTVNYWVSKKPMVSKIHKDTIYAKKGNGLYTNRENIINQFIALKITPTTNAEKFHENFEKKILKKMYLYKTNPKDVICQIVQNRAEDIATLLKSFIGVDSKNKELMSNAKSQLEALLHRELLDNNGNIIRKVKFYQTNLTGFDVRGGLATKEKTFIGFKSWLKDENLHYERIDVANIDTVKKENDSSFKVYKNDLVFFIYPDGSFRGGKIVSFLEENKTGAFQNSKFPMALKYQPSSFCEVDKQGKHTKTKPKSIGKAIGIIKLNLDIVGNIKSYQNIGNVNSECLEFLKENTDGWESSSSHKTL

SEQ ID NO: 3006 - protein, 510 aa, unidentified
  REGION 1..510: note = Category: MG91 effectors
  REGION 1..510: note = Description: MG91-198 effector
  source 1..510: note = uncultivated organism sequence
MFVVELPLKVEKWQSDVLNKRYELLAKIYNYAQKKLLRQYIYLTQMDEYKKCKTKKDKSVFFKNHPFYFKGITSKITFSEYDVTAFVEKIIKKNVSCDKTYKDFGINSSITEYLGKHIWSAWEKKIYDNGKKVSFKNKGELNTISIRKKSEYFGGLDADIEHMILSFNINGKKNSKAKKIILPINVKNLTEYEMYALKDGYDSINVVTIIRKMIRGKYKYYVQFTIKGEKPQKGRTLGKGNVGIDIGPSTVAISSLNGVTIDTLAEKCNNIEDKISDIERKMDRSRRATNPQNFTEDGQIKRINRKKGEIREWKYSKRYVKLRSKKQELLRKQAAIRKLQHNIKANEILSLGDTFIVENNPISAWAKRAKGVRKNKNGKIQTNKRFGKSIGNRAPSMFVTILQNKVKSLKGKFVPVNPKNAASRFDFTNGDFTEHNLDERKITLSNGNTHQRDMLAAFNLQHIDLTNDDLKKYNVDEMIEDYPIFCKLEKQEIKRFINGMKISNKSNIGI

SEQ ID NO: 3007 - protein, 795 aa, unidentified
  REGION 1..795: note = Category: MG91 effectors
  REGION 1..795: note = Description: MG91-199 effector
  source 1..795: note = uncultivated organism sequence
MEFKQKAFKELFSKGKQVTLNEFKNYLNNNGINIDEKSEISGVGKSSEMTRFNNKLSSYQVFHSVFGDKLEDKKYYDAAENIIYLGTIYADDKKTFKKAIEEKYGDFLTPDEIKRVSGLKFKDWGTLSAALFNLQGAEKSTGEVMTLIDALWNTQLNFMELINSDAFSYKEELEKYKKKGEGTIQNFKFEELNDYYFSAPVKRMIWQTVLIVREIEHVLGKPPVKMFVEVTRHDEEKEKIPPSRKDTFLSLYKNIKDESHDWKAIIEKADESGVIRSQKMYLYLSQMGRDLYTGKEIELDELFTTKYDIDHIIPQSLKKDDSILNNKVLTSKDFNNNIKQDNPLCEAIDDAHYAERKKLWDRLHNYNLINDEKYKRLTNRKGFSEEDLEGFIARQIVETSQAVLGVINIFKEIMPDTKIVFSKAKPVSDFRKDEIGWFKSRTLNDYHHAHDAYLNIVVGNVYNTKFTDNPRNFIKKERQKDLNPNYHMNKVFWYNVERGGKVAWIAGEDGTKKTVLKTLAKNSELMTRQSFEQTGGLCNQQITNKDDAGSGIGYLPVKMGEDISKYGGYAKISQSYFFLVEHTFKKKRIRTIETVPAYLKSQIESDPDALKRYCAEKLGLVDPDIRLRRINYQSLAKYNGFYVTICSKTGVRFNIANAVRLTLPKEWNNYIKKLEKTEGDEEITEEKNIELYDILTDKHLNSIFLKRPNPVGENLKNGREKFVSLSKKEQVSTLNNILLFTGFASAGKADISSIGGSKNAGAMAVSKNVNNADEFILIENSVTGIYSVRKDLKTI

SEQ ID NO: 3008 - protein, 1125 aa, unidentified
  REGION 1..1125: note = Category: MG91 effectors
  REGION 1..1125: note = Description: MG91-200 effector
  source 1..1125: note = uncultivated organism sequence
MKKKILSLDLGITSIGYSILDEMDNDRYALIDYGVSMFDKATDKDGKSKKLLHSASKSSTKLYDLRKSRIRKLANLFEKYGLGKAVELLKQEKENRFTNKWYLRAEKSFTKCLSVNELFSILYLMAKHRGYKSLDTDDLLEELLIELGFDVEEKKEKDAEKGKIKQALKTVESFRKKYPDKTVARIIYEIEIQKENPTFRNHDNYNYMIRREYINEEIAKIVKAQNDFGLFDKSIDIELFIKELILTIDDQKDSTNDMSLFGNCEYYPEHKVAHQYSLLSDIFKMYQSVANITFGKTKISKEQIKIVADDFFKKIKQGKNIGEIKYQDIRKVLKLSDEVQIFGKEDYRLDKKGKKVHHTIIRFHFLSSLGKMDNTFIKSIFKQENKLEILKEIFDVLEFEKAPRSIYKQVNEIFVKYALVDDKKLKDETIINLIKHKSGNSLNISAHAMIQFILYFAKGMTTDEIKKELKLERNEDYSNYMKGIKYLHVKSFEKDDNLEINNHPVKYVVSATMRLVKHLHAMYGAFDEIRVESTRELSQNEETKKAIDKANKEQEKRFQEILGNDEYQKIANHYNKNLKKYARKIMLWEEQEKLDIYSGKVIGFDDIFSNKVDIDHIIPQSLGGLSVKHNLVLAHRDENIKKSNQLPMHFVANKTEYINRVEYLFKEYRINWKKKINLLAETLDERYKDTFESKELRATSYIEALTAQMLKRYYPFPDKQKQANGQAVVHVQGRATSNIRKLLGVKTKVRDTNIHHAIDAILIGLTNKSWLQKLSNTFRENMGVIDDEARANIKKEIPLIEGVEPKELVELIEDAYNVYGEDSVFYKDIFGNTKTVNFWVSKKPMSSKIHKDTIYAKKPNGFFTVREDIIKQFIALKTTVTTDSETFKKNFEKKILQKMYLFKTNSNDVICKVVQSRADEVKNLLDSFVDIDTKNKESMSEAKEKLDSLIRKELLDNNGNVIRKVKFYQSNLKGFDIRGGLAIQEKTFIGFKATLKNKKLGYERIDASNFRKIQKINDGSFKVYKNDVVFFVYEDDNFKGGKIVSFLEDKKMGSFSNPRYPASIKFQPHSFLTLFKGVPNSHKQHSLNKAIGIIKLNLDILGNIKSYSKFGEVSKEVELKIFYKE

SEQ ID NO: 3009 - protein, 523 aa, unidentified
  REGION 1..523: note = Category: MG91 effectors
  REGION 1..523: note = Description: MG91-201 effector
  source 1..523: note = uncultivated organism sequence
MKSEKKNRCMEKEMFVVELPLKVEKWQSDVLNKRYELIAKIYNYAQKKLLRQYIYLVQMDEYKKCKTKKEKSIFFKNHPFYFKDITSKITFSEYDVTAFVEKIIKKNVSSDKTYKDFGINTSITECIGKHIWSAWEKKIYGNGKKVSLKNKGELNTISIRKKSEYFGGLDIDIEHMILSFNINGKTKSKAKKIILPINVKNLTEYEMYALKDGYDSINVVTIIRKMIRGNYKYYVQFTIEGEKPQKGRTLGNGNVGIDIGPSTVAISSLNGVTIDTLAEKCDNIESKISNIERKMDRSRRATNPQNFTEDGQIKRIDRKKGEKRVWKYSKRYVKLRNKKRELLRKQTVIRKLQHNIKANEILSLGDTFIVENNPISAWAKRANGVRKNKNGKIQTNKRFGKSIGNHAPAMFVTILQNKVESLKGKFVQVDLKNAASRFDFTNGDFTEHNLDERKITLSNGNTHQRDMLAAFNLQHIDLTNDDLKKYNVDEMIEDYPIFCKLEKEEIKRFIDKMKISNKSNIGL

SEQ ID NO: 3010 - protein, 510 aa, unidentified
  REGION 1..510: note = Category: MG91 effectors
  REGION 1..510: note = Description: MG91-202 effector
  source 1..510: note = uncultivated organism sequence
MFVVELPLKVEKWQSDVLNKRYELIAKIYNYAQKKLLRQYIYLVQMDEYKKCKTKKEKSIFFKNHPFYFKDITSKITFSEYDVTAFVEKIIKKNVSSDKTYKDFGINTSITECIGKHIWSAWEKKIYGNGKKVSLKNKGELNTISIRKKSEYFGGLDIDIEHMILSFNINGKTKSKAKKIILPINVKNLTEYEMYALKDGYDSINVVTIIRKMIRGNYKYYVQFTIEGEKPQKGRTLGNGNVGIDIGPSTVAISSLNGVTIDTLAEKCDNIESKISNIERKMDRSRRATNPQNFTEDGQIKRIDRKKGEKRVWKYSKRYVKLRNKKRELLRKQTVIRKLQHNIKANEILSLGDTFIVENNPISAWAKRANGVRKNKNGKIQTNKRFGKSIGNHAPAMFVTILQNKVESLKGKFVQVDLKNAASRFDFTNGDFTEHNLDERKITLSNGNTHQRDMLAAFNLQHIDLTNDDLKKYNVDEMIEDYPIFCKLEKEEIKRFIDKMKISNKSNIGL

SEQ ID NO: 3011 - protein, 514 aa, unidentified
  REGION 1..514: note = Category: MG91 effectors
  REGION 1..514: note = Description: MG91-203 effector
  source 1..514: note = uncultivated organism sequence
MEKEMFVVELPLKVEKWQSDVLNKRYELIAKIYNYAQKKLLRQYIYLVQMDEYKKCKTKKEKSIFFKNHPFYFKDITSKITFSEYDVTAFVEKIIKKNVSSDKTYKDFGINTSITECIGKHIWSAWEKKIYGNGKKVSLKNKGELNTISIRKKSEYFGGLDIDIEHMILSFNINGKTKSKAKKIILPINVKNLTEYEMYALKDGYDSINVVTIIRKMIRGNYKYYVQFTIEGEKPQKGRTLGNGNVGIDIGPSTVAISSLNGVTIDTLAEKCDNIESKISNIERKMDRSRRATNPQNFTEDGQIKRIDRKKGEKRVWKYSKRYVKLRNKKRELLRKQTVIRKLQHNIKANEILSLGDTFIVENNPISAWAKRANGVRKNKNGKIQTNKRFGKSIGNHAPAMFVTILQNKVESLKGKFVQVDLKNAASRFDFTNGDFTEHNLDERKITLSNGNTHQRDMLAAFNLQHIDLTNDDLKKYNVDEMIEDYPIFCKLEKEEIKRFIDKMKISNKSNIGL

SEQ ID NO: 3012 - protein, 523 aa, unidentified
  REGION 1..523: note = Category: MG91 effectors
  REGION 1..523: note = Description: MG91-204 effector
  source 1..523: note = uncultivated organism sequence
MKSEKKNRCMEKEMFVVELPLKVEKWQSDVLNKRYELIAKIYNYAQKKLLRQYIYLVQMDEYKKCKTKKEKSIFFKNHPFYFKDITSKITFSEYDVTAFVEKIIKKNVSSDKTYKDFGINTSITECIGKHIWSAWEKKIYGNGKKVSLKNKGELNTISIRKKSEYFGGLDIDIEHMILSFNINGKTKSKAKKIILPINVKNLTEYEMYALKDGYDSINVVTIIRKMIRGNYKYYVQFTIEGEKPQKGRTLGNGNVGIDIGPSTVAISSLNGVTIDTLAEKCDNIESKISNIERKMDRSRRATNPQNFTEYGQIKRIDRKKGEKRVWKYSKRYVKLRNKKRELLRKQTVIRKLQHNIKANEILSLGDTFIVENNPISAWAKRANGVRKNKNGKIQTNKRFGKSIGNHAPAMFVTILQNKVESLKGKFVQVDLKNAASRFDFTNGDFTEHNLDERKITLSNGNTHQRDMLAAFNLQHIDLTNDDLKKYNVDEMIEDYPIFCKLEKEEIKRFIDKMKISNKSNIGL

SEQ ID NO: 3013 - protein, 1353 aa, unidentified
  REGION 1..1353: note = Category: MG91 effectors
  REGION 1..1353: note = Description: MG91-205 effector
  source 1..1353: note = uncultivated organism sequence
MAVFKYYLGLDMGTNSVGWAVTDIQYNILKVKGKDLWGIREFNEASTAVERRTHRVSRRARQRKTVLIGLLKYYFHDEICKKDPYFFQRLDNSKYHLEDKDDEVKCTYNIFNDINYTDADYFKQYPTIFHLRNELIINPNEHDIRLVYLALLNMFKHRGHFLNDSLIDDGSEMKIDEAYLELANLLSEYTEYYLKTDVNITELENILSDRDESRTKKSEKIVELLEIDSKNKPYKEMIRGLCGLKFNAITIFSDVQLEDGQKLDICLSDASFEEKADDIASILGEDYFQIILSMKRLYDIGSLSEIMKGYSYLSEARVASYKKHKEDLCCLKRVIKKYCNKECYEKIFNSDEDGSYASYVGSFNSNSKQRRVGNKRSIEDLYKEIKKILKAVPQEDADVQRILTSIDNETFLPKQLTASNGVIPNQIHEKEMKKILSNAENYLPFLKEKDEKNQTVSERILMLFTFRIPYYVGPTTENSQKNGGNGWVIRKEAGQVLPWNIEEKIDMKATSEAFISRMIRRCTYISGKPVLPRASLEYQSFCVLNAINNITIDGYRISVELKQDIYNDLFLKGKKVTKKQLCKYLYLRGLITSENQVSGIDIEINNTLSTYKIFKNIFGDDIIYDRTKIMIEDIVFWCTVYGESKKFLRERLCEKYGDKLSQDQIKRILGLKFKDWGNLSKEFLELSGVNKKTNESMSIIKALWENNLNMMELINSDLFDFKEKIVEYQTDLMKTIYNIEVDDLENYYFSAPVKRMVWQTILVVKELVGVLGCEPTRIFIEMTRRHDEITKRTINRKKKFEALYKSVKDEDTDWMNVIADADDTGRIRSKKMYLYLTQKGRCMYTGKHIELSDLFNNNLYDIDHIYPRHFVKDDNIDNNLVLVCKEKNAHKRDIYPLEEQIYSSQKGMWSELKKLGFINEEKYNRLTGRNSFTDEQKAGFIARQLVETSQGTKGVANILQQLLPESKIVYAKASNVSEFRQSRDIPKSRLVNEFHHAHDAYLNIVVGNVYYVKFTQDPLKFIRNDYDKDKINNNYNLSKMFDWDVKRKGEVAWIAQKKNGDVGTIATVKKVLSKNTPLMTRYCFEGRGKISKEERHSAKKAKQVGYLPYKTSDLKIKDVTKYGGFTSITVAYYFVVEHDEKKKRIRTIESVPLYLAAKINSNHEELDKYCKNELGLVNFNIRVRKIRIGSLLKQNGYFFYITGKTGNRLIVRNAVNICFRKEWIKYSSKIEKYQEKKIIDDIITKDKNELFYDEFIKKYENSIFANRPNSILEKLKKAFPVFKESNIEQQCSILYQLLNLSKILGSECDLRLIGESPNCGKMLINKKIGDDDIYLINQSVTGLYENKINLRTV

SEQ ID NO: 3014 - protein, 1352 aa, unidentified
  REGION 1..1352: note = Category: MG91 effectors
  REGION 1..1352: note = Description: MG91-206 effector
  source 1..1352: note = uncultivated organism sequence
MQEKPYYLGLDMGTNSVGWAVTDQHYNLLKAKGKDLWGIREFIEADTSVERRTHRISRRRRQREQARIGLLNDYFHDAIIAIDPSFFQRLENSKYHLEDKDQNVRYKYNIFNDPDYTDADYYTQYPTIYHLRKELLENPKPHDVRLVYLALLNMFKHRGHFLNSGISDGNNERSLKDAYINFAISVSELTEDYFNQDVDYSTIEGILSSRDLNRTKKAEELSTVLGIDFKNKKYKEYLRAICGLKINAYTLFSDQLPDDTTKIDLCVSDASFDEKSEELVSLIGEDLFQIILNIKEIYDIGSLAGILKGYTYLSQARVAAYDKHKHDLKLLKSSIKKYCTKEEYNNFFNSDADGSYASYIGSFNSGNKERRVGSKRTSEDLYKEIKKLLKGANKSDPAINEIFTSIETESFLPKQLTASNGIIPNQVHSKEMARILTNAENYLPFLKETDENNLSISNRILQLYKFQIPYYIGPVTEKSQRDGGNGWVIRKDNGRVFPWNIEEKIDVKATSEAFISRMVRRCTYMNGKQVLPKASLEYESFRVLNEINNLRIDGERIPVTLKQDIYTDLFQKGKKVTKKQLCNYLATRGLIESSEQVTGIDIAINNSLSTYGKFKAIFGEDIKLDHIQHMIEDIVFWCTVYGDSKQFLKEQIEDKYKGKLSPEQMKRILGFKFKDWGNLSKEFFELKGADKSTGEAVSIIRALWENNLNLMELINSPEFDFKEQLADYEANSLKTLSDFEPEDLNDYYFSAPVRRMIWQTTLIIKELVHVLGKEPARIFIEMTREKDASRGRTLSRKKKFEDLYKNVKDENTDWAKVIEHADESGTIRSKKMYLYLTQKGRCMYTGNHIELSDLFNDNLYDIDHIYPRHFVKDDNIDNNLVLVTKEKNAHKSDNYPLEAEIFNKQRNMWTQLRKEGFISEEKYNRLMGRNAFTDEQKAGFIARQLVETSQGTKGVAELFHQLLPNSKIVYAKAGNVSDFRRNREFPKSRLVNDFHHAHDAYLNIVVGNVYYVKFTQNPINYIKNSYNKDMNKNNYNLSRMFDWDVKRGDEVAWIAQKQDGAAGTISTVKKMLSKNTPLMTRLSYEGKGALANETLYSAEKAKGEGYIPFKSSDTKIQDVTKYGGFTSVTGAYFFLVEHDEKKKRIRTIESVPLYLADKIDKDSSELERYCDKLGLVNYDVRVRKIKIGSLIKYNGYFCYITGKTGYRLIVRNATNLCLASNWRKYIKKIEKYKETTIIDNVITAEENIKLYNELLNKFTVGIFGRRPNPIGEKMDSARDKFASLSIENQCLALYQILQLTAILGNESDLQLIGASTHAGKMLISKKIGTDEIYLINQSPTGLFETKIDLQTI

SEQ ID NO: 3015 - protein, 1352 aa, unidentified
  REGION 1..1352: note = Category: MG91 effectors
  REGION 1..1352: note = Description: MG91-207 effector
  source 1..1352: note = uncultivated organism sequence
MQEKPYYLGLDMGTNSVGWAVTDQHYNLLKAKGKDLWGIREFIEADTSVERRTHRISRRRRQREQARIGLLNDYFHDAIIAIDPSFFQRLENSKYHLEDKDQNVRYKYNIFNDPDYTDADYYTQYPTIYHLRKELLENPKPHDVRLVYLALLNMFKHRGHFLNSGISDGNNERSLKDAYINFAISVSELTEDYFNQDVDYSTIEGILSSRDLNRTKKAEELSTVLGIDFKNKKYKEYLRAICGLKINAYTLFSDQLPDDTTKIDLCVSDASFDEKSEELVSLIGEDLFQIILNIKEIYDIGSLAGILKGYTYLSQARVAAYDKHKHDLKLLKSSIKKYCTKEEYNNFFNSDADGSYASYIGSFNSGNKERRVGSKRTSEDLYKEIKKLLKGANKSDPAINEIFTSIETESFLPKQLTASNGIIPNQVHSKEMARILTNAENYLPFLKETDENNLSISNRILQLYKFQIPYYIGPVTEKSQRDGGNGWVIRKDNGRVFPWNIEEKIDVKATSEAFISRMVRRCTYMNGKQVLPKASLEYESFRVLNEINNLRIDGERIPVTLKQDIYTDLFQKGKKVTKKQLCNYLATRGLIESSEQVTGIDIAINNSLSTYGKFKAIFGEDIKLDHIQHMIEDIVFWCTVYGDSKQFLKEQIEDKYKGKLSPEQMKRILGFKFKDWGNLSKEFFELKGADKSTGEAVSIIRALWENNLNLMELINSSEFDFKEQLADYEANSLKTLSDFEPEDLNDYYFSAPVRRMIWQTTLIIKELVHVLGKEPARIFIEMTREKDASRGRTLSRKKKFEDLYKNVKDENTDWAKVIEHADESGTIRSKKMYLYLTQKGRCMYTGNHIELSDLFNDNLYDIDHIYPRHFVKDDNIDNNLVLVTKEKNAHKSDNYPLEAEIFNKQRNMWTQLRKEGFISEEKYNRLMGRNAFTDEQKAGFIARQLVETSQGTKGVAELFHQLLPNSKIVYAKAGNVSDFRRNRELPKSRLVNDFHHAHDAYLNIVVGNVYYVKFTQNPINYIKNSYNKDMNKNNYNLSRMFDWDVKRGDEVAWIAQKQDGAAGTISTVKKMLSKNTPLMTRLSYEGKGALANETLYSAEKAKGEGYIPFKSSDTKIQDVTKYGGFTSVTGAYFFLVEHDEKKKRIRTIESVPLYLADKIDKDSSELERYCDKLGLVNYDVRVRKIKIGSLIKYNGYFCYITGKTGYRLIVRNATNLCLTSNWRKYIKKIEKYKETTIIDNVITAEENIKLYNELLNKFTVGIFGRRPNPIGEKMDSARDKFASLSIENQCLALYQILQLTAILGNESDLQLIGASTHAGKMLISKKIGTDEIYLINQSPTGLFETKIDLQTI

SEQ ID NO: 3016 - protein, 1352 aa, unidentified
  REGION 1..1352: note = Category: MG91 effectors
  REGION 1..1352: note = Description: MG91-208 effector
  source 1..1352: note = uncultivated organism sequence
MLEKPYYLGLDMGTNSVGWAVTDQHYNLLKAKGKDLWGIREFTEADTSVERRTHRISRRRRQREQARIGLLNDYFHDAIIAIDPSFFQRLENSKYHLEDKDQNVRYKYNIFNDPDYTDVDYYVQYPTIYHLRKELLENPKPHDVRLVYLALLNMFKRRGHFLNAGISDGNNERSLKDAYINFAISVSELTEDYFNQDVDYSAIEEILSSRDLNRTKKAEELSTVLGIDFKNKKYKEYLRAICGLKINAYTLFSDQLPDDTTKIDLCVSDASFEEKSEELVSLIGEDLFQIILNIKEIYDIGSLTGILKGYTYLSQARVATYDKHKHDLKLLKSSIKKYCTKEEYNNFFNSDADGSYASYIGSFNSGNKKRRVGSKRTSEDLYKEIKKLLKDANKSDPAINEIFTSIETESFLPKQLTASNGIIPNQVHSKEMAKILSNAENYLPFLKDTDENNLSISNRILQLYKFQIPYYIGPVTEKSQRDGGNGWVIRKDNGRVLPWNIEEKIDVKATSETFISRMVRRCTYMNGKQVLPKASLEYESFRVLNEINNLRIDGERIPVALKQDIYTDLFQKGKKVTKKQLCNYLVTRGLIESSEQVTGIDIAINNSLSTYGKFKAILGEDIKLDHIQHMIEDIVFWCTVYGDSKQFLKEQIEDKYKEKLSPEQMKRILGFKFKDWGNLSKEFFELKGADKSTGEAISIIRALWENNLNLMELINSPEFDFKERLTDYQTNSLKTLSDFEPEDLNEYYFSAPVRRMIWQTTSIIKELVHVLGKEPARIFIEMTREKDASRGRTLSRKKKFEDLYKNVKDENTDWAKVIEHADESGTIRSKKMYLYLTQKGKCMYTGKHIELSDLFNDNLYDIDHIYPRHFVKDDNIDNNLVLVTKEKNAHKSDNYPLEAEIFNKQRNMWTQLRKEGFISEEKYNRLMGRNAFTDEQKAGFIARQLVETSQGTKGVAELFHQLLPNSKIVYAKAGNVSDFRRNRELPKSRLVNDFHHAHDAYLNIVVGNVYYVKFTQNPINYIKNSYNKDMDKNNYNLSRMFDWDVKRGDEVAWIAQKKDGTAGTISTVKKMLSKNTPLMTRLSYEGKGALANETLYSAEKAKGEGYIPFKSSDAKIQDVTKYGGFTSVTGAYFFLVEHDEKKKRIRTIESVPLYLADRIDKDSSELERYCDKLGLVNYDIRVRKIKIGSLINRNGYFAYLTGKTGKQLILRNATSLCLDKKWTIYIKKIEKYKETKVLDSIITSETTVNLYNELLNKFTVGIYGRRPNPIGEKMDSARDKFASLSIENQCLALYQILQLSAILGNESDLQLIGASTHAGKMLISRKIGTDEIYLINQSPTGLFETKIDLQTI

SEQ ID NO: 3017 - protein, 1359 aa, unidentified
  REGION 1..1359: note = Category: MG91 effectors
  REGION 1..1359: note = Description: MG91-209 effector
  source 1..1359: note = uncultivated organism sequence
MLNTPYYLGLDMGTNSVGWAVTDKNYNLLRAKGKDLWGIREFSDSATSVDRRSYRIRRRRRQREQARIGLLKYYFNDSIIAKDPSFFQRLENSKYHLEDKDEAVKYKFNIFNDKTYTDIDYYTQYPTIYHLRKELLESSEPHDVRLVYLALLNMFKHRGHFLNAEIGDVAEERKLKDAYIDFCSCVSELTNESFNLDIDYSAVEEILSSRDISRTKKSEALASILNIDVKNKKYKEYVKAICGLKVNAYTLFSEQLSDEVKRIDICVSDASFDTKREDYISILGEDLFQIILYIKEIYDIGSLAGILKGYSYLSFARVATYEKHKSDLRKLKDCIRKYCSKEDYNQFFNSDAAGFYASYIGSFNSGKKQRRVGKNTTSEDLYKEIKKILKNADKNDPAIIDIFSSIDTESFLPKQLTASNGVIPNQVHYKEMAKILSNAESYLPFLREKNESNLSVSERILQIYKFQIPYYIGPVTEKSHRDGGNGWVIRKSNGRVLPWNINEKIDVKATSEAFISRMVRRCTYMNGAQVLPKASLEYESFRVLNEINNLRIDGERIPVDLKQAIYIDIFQKGKKITADILHKYLFNKGYIQSSEQVTGIDININNSLSTYGKFKVIFGEDIKLDSVQHMIEDIVFWCTVYGDSKKFLQEQIEEKYSDKISKEQLKRILGFKFKDWGSLSKEFFELKATDKSTGENISIIRALWENNLNLMELINSSKFNFKERLEEYRITSLKTLSDFEPEDLREYYFSAPVRKMIWQTMLVIKELVHVLGHEPERIFIEIPRDKDPSIGRTISRKKKFEELYKNVKDESVDWMNVIEHADDSGSLRSKKMYLYLTQKGRCMYTGEHIELSDLFNKSLYDIDHIYPRHFVKDDNIDNNLVLVKREKNAHKSDNYPLEAEIFNNQKKMWAQLRKEDFINEEKYKRLMGRNPFTDEQKAGFIARQLVETQQGTKGVAELLQQLLPNSKIVYTKAGNVSDFRHSREIPKSRLINDFHHAHDAYLSIVVGNVYYVKFTQNPINFIKNAYNKDSSKNNYNLTRMFDWDVKRRDEVAWIAQNKNGTVGTIAIVKKMLKRNTPLMTRLSYEGKGGLTKETLYSAEKAKGEGYIPFKSSDKKMQDVTKYGGFTSVKGAYFFLVEHDEKKKQIRTIESVPLYLADKIEKDPAELERYCQKLGLVNYNIRVRKIKIGTLIKRNGYFAYLTGKTGKQLILRNATNLCLDSKWGTYIKKIEKYKDTGVLDNTLDTDTNIKLYNELLDKFTTGIYGKRPNPIGDKMLSAKNTFTSFTLDNQCNLIYQILQLSKILGFETDLSLLHTNKKSDKPTREGGMQISKKVSNTTSMYLINQSPTGLFEKQIDLLTV

SEQ ID NO: 3018 - protein, 1352 aa, unidentified
  REGION 1..1352: note = Category: MG91 effectors
  REGION 1..1352: note = Description: MG91-210 effector
  source 1..1352: note = uncultivated organism sequence
MQEKPYYLGLDMGTNSVGWAVTDQHYNLLKAKGKDLWGIREFIEADTSVERRTHRISRRRRQREQARIGLLNDYFHDAIIAIDPSFFQRLENSKYHLEDKDQNVRYKYNIFNDPDYTDADYYTQYPTIYHLRKELLENPKPHDVRLVYLALLNMFKHRGHFLNSGISDGNNERSLKDAYINFAISVSELTEDYFNQDVDYSTIEGILSSRDLNRTKKAEELSTVLGIDFKNKKYKEYLRAICGLKINAYTLFSDQLPDDTTKIDLCVSDASFDEKSEELVSLIGEDLFQIILNIKEIYDIGSLAGILKGYTYLSQARVAAYDKHKHDLKLLKSSIKKYCTKEEYNNFFNSDADGSYASYIGSFNSGNKERRVGSKRTSEDLYKEIKKLLKGANKSDPAINEIFTSIETESFLPKQLTASNGIIPNQVHSKEMARILTNAENYLPFLKETDENNLSISNRILQLYKFQIPYYIGPVTEKSQRDGGNGWVIRKDNGRVFPWNIEEKIDVKATSEAFISRMVRRCTYMNGKQVLPKASLEYESFRVLNEINNLRIDGERIPVTLKQDIYTDLFQKGKKVTKKQLCNYLATRGLIESSEQVTGIDITINNSLSTYGKFKAIFGEDIKLDHIQHMIEDIVFWCTVYGDSKQFLKEQIEDKYKGKLSPEQMKRILGFKFKDWGNLSKEFFELKGADKSTGEAVSIIRALWENNLNLMELINSPEFDFKEQLADYEANSLKTLSDFEPEDLNDYYFSAPVRRMIWQTTLIIKELVHVLGKEPARIFIEMTREKDASRGRTLSRKKKFEDLYKNVKDENTDWAKVIEHADESGTIRSKKMYLYLTQKGRCMYTGNHIELSDLFNDNLYDIDHIYPRHFVKDDNIDNNLVLVTKEKNAHKSDNYPLEAEIFNKQRNMWTQLRKEGFISEEKYNRLMGRNAFTDEQKAGFIARQLVETSQGTKGVAELFHQLLPNSKIVYAKAGNVSDFRRNREFPKSRLVNDFHHAHDAYLNIVVGNVYYVKFTQNPINYIKNSYNKDMNKNNYNLSRMFDWDVKRGDEVAWIAQKQDGAAGTISTVKKMLSKNTPLMTRLSYEGKGALANETLYSAEKAKGEGYIPFKSSDTKIQDVTKYGGFTSVTGAYFFLVEHDEKKKRIRTIESVPLYLADKIDKDSSELERYCDKLGLVNYDVRVRKIKIGSLIKYNGYFCYITGKTGYRLIVRNATNLCLASNWRKYIKRIEKYKETTIIDNVITAEENIKLYNELLNKFTVGIFGRRPNPIGEKMDSARDKFASLSIENQCLALYQILQLTAILGNESDLQLIGASTHAGKMLISKKIGTDEIYLINQSPTGLFETKIDLQTI

SEQ ID NO: 3019 - protein, 1359 aa, unidentified
  REGION 1..1359: note = Category: MG91 effectors
  REGION 1..1359: note = Description: MG91-211 effector
  source 1..1359: note = uncultivated organism sequence
MLEKPYYLGLDMGTNSVGWAVTDQQYNLLKAKGKDLWGIREFAEADTSVERRTHRISRRRRQREQARIGLLNDYFHDAIIAIDPSFFQRLENSKYHLEDKDQNVRYKYNIFNDPDYTDADYYTQYPTIYHLRKELLENPKPHDVRLVYLALLNMFKHRGHFLNSGISDGNNERSLKDAYINFAISVSELTEDYFNQDVDYSTIEGILSSRDLNRTKKAEELSTVLGIDFKNKKYKEYLRAICGLKINAYTLFSDQLPDDTTKIDLCVSDASFDEKSEELVSLIGEDLFQIILNIKEIYDIGSLAGILKGYTYLSQARVAAYDKHKHDLKLLKSSIKKYCTKEEYNNFFNSDADGSYASYIGSFNSGNKERRVGSKRTSEDLYKEIKKLLKGANKSDPAINEIFTSIETESFLPKQLTASNGIIPNQVHSKEMARILTNAENYLPFLKETDENNLSISNRILQLYKFQIPYYIGPVTEKSQRDGGNGWVIRKDNGRVFPWNIEEKIDVKATSEAFISRMVRRCTYMNGKQVLPKASLEYESFRVLNEINNLRIDGERIPVTLKQDIYTDLFQKGKKVTKKQLCNYLATRGLIESSEQVTGIDIAINNSLSTYGKFKAIFGEDIKLDHIQHMIEDIVFWCTVYGDSKQFLKEQIEDKYKGKLSPEQMKRILGFKFKDWGNLSKEFFELKGADKSTGEAVSIIRALWENNLNLMELINSPEFDFKEQLADYEANSLKTLSDFEPEDLNDYYFSAPVRRMIWQTTLIIKELVHVLGKEPARIFIEMTREKDASRGRTLSRKKKFEDLYKNVKDENTDWAKVIEHADESGTIRSKKMYLYLTQKGRCMYTGNHIELSDLFNDNLYDIDHIYPRHFVKDDNIDNNLVLVTKEKNAHKSDNYPLEAEIFNKQRNMWTQLRKEGFISEEKYNRLMGRNAFTDEQKAGFIARQLVETSQGTKGVAELFHQLLPNSKIVYAKAGNVSDFRRNRELPKSRLVNDFHHAHDAYLNIVVGNVYYVKFTQNPINYIKNSYNKDMNKNNYNLSRMFDWDVKRGDEVAWIAQKQDGATGTISTVKKMLSKNTPLMTRLSYEGKGALANETLYSAEKAKGEGYIPFKSSDTKIQDVTKYGGFTSVTGAYFFLVEHDEKKKRIRTIESVPLYLADKIDKDSSELERYCDKLGLVNYDIRVRKIKIGSLLNRNGYFAYLTGKTGKQLILRNATNLCLDKKWTRYIKKIEKYKETNVLDSIITSETMVNLYNELLNKFTVGIYGRRPNPIGEKMDSAKNTFTSYTLDNQCNLIYQILQLSKILGFETDLSLLRTNKQSGKPTREGGMQISKKIDNTTSMYLINQSPTGLFETKIDLQTI

SEQ ID NO: 3020 - protein, 1352 aa, unidentified
  REGION 1..1352: note = Category: MG91 effectors
  REGION 1..1352: note = Description: MG91-212 effector
  source 1..1352: note = uncultivated organism sequence
MQEKPYYLGLDMGTNSVGWAVTDQHYNLLKAKGKDLWGIREFIEADTSVERRTHRISRRRRQREQARIGLLNDYFHDAIIAIDPSFFQRLENSKYHLEDKDQNVRYKYNIFNDPDYTDADYYTQYPTIYHLRKELLENPKPHDVRLVYLALLNMFKHRGHFLNSGISDGNNERSLKDAYINFAISVSELTEDYFNQDVDYSTIEGILSSRDLNRTKKAEELSTVLGIDFKNKKYKEYLRAICGLKINAYTLFSDQLPDDTTKIDLCVSDASFDEKSEELVSLIGEDLFQIILNIKEIYDIGSLAGILKGYTYLSQARVAAYDKHKHDLKLLKSSIKKYCTKEEYNNFFNSDADGSYASYIGSFNSGNKERRVGSKRTSEDLYKEIKKLLKGANKSDPAINEIFTSIETESFLPKQLTASNGIIPNQVHSKEMARILTNAENYLPFLKETDENNLSISNRILQLYKFQIPYYIGPVTEKSQRDGGNGWVIRKDNGRVFPWNIEEKIDVKATSEAFISRMVRRCTYMNGKQVLPKASLEYESFRVLNEINNLRIDGERIPVTLKQDIYTDLFQKGKKVTKKQLCNYLATRGLIESSEQVTGIDIAINNSLSTYGKFKAIFGEDIKLDHIQHMIEDIVFWCTVYGDSKQFLKEQIEDKYKGKLSPEQMKRILGFKFKDWGNLSKEFFELKGADKSTGESVSIIRALWENNLNLMELINSSEFDFKEQLADYEANSLKTLSDFEPEDLNDYYFSAPVRRMIWQTTLIIKELVHVLGKEPARIFIEMTREKDASRGRTLSRKKKFEDLYKNVKDENTDWAKVIEHADESGTIRSKKMYLYLTQKGRCMYTGNHIELSDLFNDNLYDIDHIYPRHFVKDDNIDNNLVLVTKEKNAHKSDNYPLEAEIFNKQRNMWTQLRKEGFISEEKYNRLMGRNAFTDEQKAGFIARQLVETSQGTKGVAELFHQLLPNSKIVYAKAGNVSDFRRNRELPKSRLVNDFHHAHDAYLNIVVGNVYYVKFTQNPINYIKNSYNKDMNKNNYNLSRMFDWDVKRGDEVAWIAQKQDGAAGTISTVKKMLSKNTPLMTRLSYEGKGALANETLYSAEKAKGEGYIPFKSSDTKIQDVTKYGGFTSVTGAYFFLVEHDEKKKRIRTIESVPLYLADKIDKDSSELERYCDKLGLVNYDVRVRKIKIGSLIKYNGYFCYITGKTGYRLIVRNATNLCLTSNWRKYIKKIEKYKETTIIDNVITAEENIKLYNELLNKFTVGIFGRRPNPIGEKMDSARDKFASLSIENQCLALYQILQLTAILGNESDLQLIGASTHAGKMLISKKIGTDEIYLINQSPTGLFETKIDLQTI

SEQ ID NO: 3021 - protein, 1352 aa, unidentified
  REGION 1..1352: note = Category: MG91 effectors
  REGION 1..1352: note = Description: MG91-213 effector
  source 1..1352: note = uncultivated organism sequence
MQEKPYYLGLDMGTNSVGWAVTDQHYNLLKAKGKDLWGIREFIEADTSVERRTHRISRRRRQREQARIGLLNDYFHDAIIAIDPSFFQRLENSKYHLEDKDQNVRYKYNIFNDPDYTDADYYTQYPTIYHLRKELLENPKPHDVRLVYLALLNMFKHRGHFLNSGISDGNNERSLKDAYINFAISVSELTEDYFNQDVDYSTIEGILSSRDLNRTKKAEELSTVLGIDFKNKKYKEYLRAICGLKINAYTLFSDQLPDDTTKIDLCVSDASFDEKSEELVSLIGEDLFQIILNIKEIYDIGSLAGILKGYTYLSQARVAAYDKHKHDLKLLKSSIKKYCTKEEYNNFFNSDADGSYASYIGSFNSGNKERRVGSKRTSEDLYKEIKKLLKGANKSDPAINEIFTSIETESFLPKQLTASNGIIPNQVHSKEMARILTNAENYLPFLKETDENNLSISNRILQLYKFQIPYYIGPVTEKSQRDGGNGWVIRKDNGRVFPWNIEEKIDVKATSEAFISRMVRRCTYMNGKQVLPKASLEYESFRVLNEINNLRIDGERIPVTLKQDIYTDLFQKGKKVTKKQLCNYLATRGLIESSEQVTGIDIAINNSLSTYGKFKAIFGEDIKLDHIQHMIEDIVFWCTVYGDSKQFLKEQIDDKYKGKLSPEQMKRILGFKFKDWGNLSKEFFELKGADKSTGEAVSIIRALWENNLNLMELINSSEFDFKEQLADYEANSLKTLSDFEPEDLNDYYFSAPVRRMIWQTTLIIKELVHVLGKEPARIFIEMTREKDASRGRTLSRKKKFEDLYKNVKDENTDWAKVIEHADESGTIRSKKMYLYLTQKGRCMYTGNHIELSDLFNDNLYDIDHIYPRHFVKDDNIDNNLVLVTKEKNAHKSDNYPLEAEIFNKQRNMWTQLRKEGFISEEKYNRLMGRNAFTDEQKAGFIARQLVETSQGTKGVAELFHQLLPNSKIVYAKAGNVSDFRRNRELPKSRLVNDFHHAHDAYLNIVVGNVYYVKFTQNPINYIKNSYNKDMNKNNYNLSRMFDWDVKRGDEVAWIAQKQDGAAGTISTVKKMLSKNTPLMTRLSYEGKGALANETLYSAEKAKGEGYIPFKSSDTKIQDVTKYGGFTSVTGAYFFLVEHDEKKKRIRTIESVPLYLADKIDKDSSELERYCDKLGLVNYDVRVRKIKIGSLIKYNGYFCYITGKTGYRLIVRNATNLCLTSNWRKYIKKIEKYKETTIIDNVITAEENIKLYNELLNKFTVGIFGRRPNPIGEKMDSARDKFASLSIENQCLALYQILQLTAILGNESDLQLIGASTHAGKMLISKKIGTDEIYLINQSPTGLFETKIDLQTI

SEQ ID NO: 3022 - protein, 1359 aa, unidentified
  REGION 1..1359: note = Category: MG91 effectors
  REGION 1..1359: note = Description: MG91-214 effector
  source 1..1359: note = uncultivated organism sequence
MLEKPYYLGLDMGTNSVGWAVTDQQYNLLKAKGKDLWGIREFAEADTSVERRTHRISRRRRQREQARIGLLNDYFHDAIIAIDPSFFQRLENSKYHLEDKDQNVRYKYNIFNDPDYTDADYYTQYPTIYHLRKELLENPKPHDVRLVYLALLNMFKHRGHFLNSGISDGNNERSLKDAYINFAISVSELTEDYFNQDVDYSTIEGILSSRDLNRTKKAEELSTVLGIDFKNKKYKEYLRAICGLKINAYTLFSDQLPDDTTKIDLCVSDASFDEKSEELVSLIGEDLFQIILNIKEIYDIGSLAGILKGYTYLSQARVAAYDKHKHDLKLLKSSIKKYCTKEEYNNFFNSDADGSYASYIGSFNSGNKERRVGSKRTSEDLYKEIKKLLKGANKSDPAINEIFTSIETESFLPKQLTASNGIIPNQVHSKEMARILTNAENYLPFLKETDENNLSISNRILQLYKFQIPYYIGPVTEKSQRDGGNGWVIRKDNGRVFPWNIEEKIDVKATSEAFISRMVRRCTYMNGKQVLPKASLEYESFRVLNEINNLRIDGERIPVTLKQDIYTDLFQKGKKVTKKQLCNYLATRGLIESSEQVTGIDIAINNSLSTYGKFKAIFGEDIKLDHIQHMIEDIVFWCTVYGDSKQFLKEQIEDKYKGKLSPEQMKRILGFKFKDWGNLSKEFFELKGADKSTGEAVSIIRALWENNLNLMELINSPEFDFKEQLADYEANSLKTLSDFEPEDLNDYYFSAPVRRMIWQTTLIIKELVHVLGKEPARIFIEMTREKDASRGRTLSRKKKFEDLYKNVKDENTDWAKVIEHADESGTIRSKKMYLYLTQKGRCMYTGNHIELSDLFNDNLYDIDHIYPRHFVKDDNIDNNLVLVTKEKNAHKSDNYPLEAEIFNKQRNMWTQLRKEGFISEEKYNRLMGRNAFTDEQKAGFIARQLVETSQGTKGVAELFHQLLPNSKIVCAKAGNVSDFRRNRELPKSRLVNDFHHAHDAYLNIVVGNVYYVKFTQNPINYIKNSYNKDMNKNNYNLSRMFDWDVKRGDEVAWIAQKQDGATGTISTVKKMLSKNTPLMTRLSYEGKGALANETLYSAEKAKGEGYIPFKSSDTKIQDVTKYGGFTSVTGAYFFLVEHDEKKKRIRTIESVPLYLADKIDKDSSELERYCDKLGLVNYDIRVRKIKIGSLLNRNGYFAYLTGKTGKQLILRNATNLCLDKKWTRYIKKIEKYKETNVLDSIITSETMVNLYNELLNKFTVGIYGRRPNPIGEKMDSAKNTFTSYTLDNQCNLIYQILQLSKILGFETDLSLLRTNKQSGKPTREGGMQISKKIDNTTSMYLINQSPTGLFETKIDLQTI

SEQ ID NO: 3023 - protein, 1147 aa, unidentified
  REGION 1..1147: note = Category: MG91 effectors
  REGION 1..1147: note = Description: MG91-215 effector
  source 1..1147: note = uncultivated organism sequence
MSRTRKAEGLAEILGVDYKNKPYKELIRGLCGLKFNACAIFPEIQSDEVPKLDICLSEASFDEKSDEIANILGEDYFEIIMAMKDIYDIGSLAGIRKGYNYLSQARVASYERHKEDLKLLKEVIKKYCSKDDYDSFFNSDADGSYASYVGSYNSKTKQRRVGNKRSSEELYKAIKKLFKNVPVEDADVQSILTSIENETFLPKQLTVSNGVIPNQVHAEEMKKILSNAENYLPFLKEKDETGLSVSEKILKLFSFQIPYYVGPTTEKSNKDGGNGWVVRKEEGQVLPWNIDEKIDMKATSEAFISRMVRRCTYISGELVLPKSSLEYQSFCVLNEINNIKIDGERISVELKQDIYKEVFQKGKRVTKKQLCKYLHTRGIIEAEEQVTGIDVTINNALTTYGKFKAILGDDISKDSVQKMIEDIVFWCTVYGDSKKFLKDRIEEKYGEKLTKEQIKRIIGFKFKDWGNLSKNFLELSGADVSTGESVSIIRALWNDNLNLMELINSRLYNYKERLAECQNTMMKTLSDIEAEDLDEYYFSAPVKRMIWQTILIIKELVKVLGCEPDRIFVEMTRRPDERKMRTESRRKKFEELYKKVKDEDVDWMKVIAHADETGSIRSKKMYLYLTQKGRCMYTGKHIELSDLFNNNLYDIDHIYPRHFVKDDNIDNNLVLVCKEKNAHKSDIYPLEDEILASQKNMWSELRRSELRRSGFITEEKYNRLIGRNPFTDEQKAGFIARQLVETSQGTKGVANILQQLLPESKIVYAKASNVSEFRNTRDIPKSRLINEFHHAHDAYLNIVVGNVYYVKFTQNPLNFIKNDYDRDKTKNNYNLSKMFDWDVERNGEVAWIAQKKDGEAGTIATVKKVLERNTPLMTRYSFEKKGRLTKEERHSAIDAKKDQYLPFKTSDSKMQDVTKYGGFNDIAGTYFFLVEHTEKKNRIRTIESVPLYIAKKIDQNPIELEKYCEQVLGLVDFDIRVRKIKIGSLIKRNNYFCYITGKKPGRLIVRNAVNLCLKNEWIKYISKLEKYNEKNVIDEMITKEKNQLLYLELINKFRNSIFSKRPNGIGKKLEDARNIFNDLSTEEQCIVLYKVLQLSAVMGYEADLSLIKYSKSAGAMQISKKIGDEDIYLINQSVTGLYEKKINLRTV

SEQ ID NO: 3024 - protein, 1359 aa, unidentified
  REGION 1..1359: note = Category: MG91 effectors
  REGION 1..1359: note = Description: MG91-216 effector
  source 1..1359: note = uncultivated organism sequence
MIEKPYYLGLDMGTNSVGWAVTDQHYNLLKAKGKDLWGIREFTEADTSVERRTHRISRRRRQREQARIGLLNDYFHDAIIAIDPSFFQRLENSKYHLEDKDQNVRYKYNIFNDPDYTDVDYYTQYPTIYHLRKELLENPKPHDIRLVYLALLNMFKRRGHFLNAAISDGNNERSLKDAYINFAISVSELTEDYFNQDVDYSAIEEILSSRDLNRTKKAEELSTVLGIDFKNKKYKEYLRAICGLKINAYTLFSEQLPDDTTKIDICVSDASFDEKSEELVSLIGEDLFQIILNIKEIYDIGSLTGILKGYTYLSQARVAAYDKHKHDLKLLKSSIKKYCTKEEYNNFFNSDADGSYASYIGSFNSGNKERRVGSKRTSEDLYKEIKKILKDANKNDPVINEIFTSIETESFLPKQLTASNGIIPNQVHSKEMAKILANAENYLPFLKDTDENNLSISNRILQLYKFQIPYYIGPVTEKSQRDGGNGWVIRKDNGHVLPWNIEEKIDVKATSEAFISRMVRRCTYMNGKQVLPKASLEYESFRVLNEINNLRIDGERIPVALKQDIYTDLFQKGKKVTKKQLCNYLVTRGLIESSEQVTGIDIAINNSLSTYGKFKAILGEDIKLDHIQHMIEDIVFWCTVYGDSKQFLKEQIEDKYKEKLSPEQMKRILGFKFKDWGNLSKEFFELKGADKSTGEAISIIRALWENNLNLMELINSPEFDFKERLADYETNSLKTLSDFEPEDLNEYYFSAPVRRMIWQTTLIIKELVHVLGKEPARIFIEMTREKDTSRGRTLSRKKKFEDLYKNVKDENTDWAKVIEHADESGTIRSKKMYLYLTQKGRCMYTGNHIELSDLFNDNLYDIDHIYPRHFVKDDNIDNNLVLVTKEKNAHKSDNYPLEAEIFNKQRNMWTQLRKEGFISEEKYNRLMGRNAFTDEQKAGFIARQLVETSQGTKGVAELFHQLLPNSKIVYAKAGNVSDFRRNRELPKSRLVNDFHHAHDAYLNIVVGNVYYVKFTQNPINYIKNSYNKDMNKNNYNLSRMFDWDVKRGDEAAWIAQKKDGTAGTISTVKKMLSKNTPLMTRLSYEGKGALANETLYSAKKAKEEGYIPFKSSDAKIQDVTKYGGFTSVTGAYFFLVEHDEKKKRIRTIESVPLYLANKIEKDSSELERYCDKLGLVNYDIRVRKIKIGTLIKYNGYFCYITGKTGYRLIVRNATNLCLASNWTKYIKKIEKYKETTIIDNVITAEENIKLYNELLNKFTVGIFGRRPNPIGEKMDSAKNTFTSYTLDNQCNLIYQILQLSKILGFETDLSLLRTNKQFGKPTREGGMQISKKINNTTSMYLINQSPTGLFETKIDLQTI

SEQ ID NO: 3025 - protein, 1352 aa, unidentified
  REGION 1..1352: note = Category: MG91 effectors
  REGION 1..1352: note = Description: MG91-217 effector
  source 1..1352: note = uncultivated organism sequence
MLEKPYYLGLDMGTNSVGWAVTDQHYNLLKAKGKDLWGIREFIEADTSVERRTHRISRRRRQREQARIGLLNDYFHDAIIAIDPSFFQRLENSKYHLEDKDQNVRYKYNIFNDPDYTDVDYYAQYPTIYHLRKELLENPKPHDVRLVYLALLNMFKRRGHFLNAGISDGNNERSLKDAYINFAISVSELTEDYFNQDVDYSAIEGILSSRDLNRTKKAEELSTVLGIDFKNKKYKEYLRAICGLKINAYTLFSDQLPDDTTKIDLCVSDASFDEKSEELVSLIGEDLFQIILNIKEIYDIGSLAGILKGYTYLSQARVAAYDKHKHDLKLLKSSIKKYCTKEEYNNFFNSDADGSYASYIGSFNSGNKERRVGSKRTSEDLYKEIKKLLKGANKSDPAINEIFTSIETESFLPKQLTASNGIIPNQVHSKEMARILTNAENYLPFLKETDENNLSISNRILQLYKFQIPYYIGPVTEKSQRDGGNGWVIRKDNGRVFPWNIEEKIDVKATSEAFISRMVRRCTYMNGKQVLPKASLEYESFRVLNEINNLRIDGERIPVTLKQDIYTDLFQKGKKVTKKQLCNYLATRGLIESSEQVTGIDIAINNSLSTYGKFKAIFGEDIKLDHIQHMIEDIVFWCTVYGDSKQFLKEQIEDKYKRKLSPEQMKRILGFKFKDWGNLSKEFFELKGADKSTGEAVSIIRALWENNLNLMELINSPEFDFKEQLADYEANSLKTLSDFEPEDLNDYYFSAPVRRMIWQTTLIIKELVHVLGKEPARIFIEMTREKDASRGRTLSRKKKFEDLYKNVKDENTDWAKVIEHADESGTIRSKKMYLYLTQKGRCMYTGNHIELSDLFNDNLYDIDHIYPRHFVKDDNIDNNLVLVTKEKNAHKSDNYPLEAEIFNKQRNMWTQLRKEGFISEEKYNRLMGRNAFTDEQKAGFIARQLVETSQGTKGVAELFHQLLPNSKIVYAKAGNVSDFRRNRELPKSRLVNDFHHAHDAYLNIVVGNVYYVKFTQNPINYIKNSYNKDMNKNNYNLSRMFDWDVKRGDEVAWVAQKQDAAAGTISTVKKMLSKNTPLMTRLSYEGKGALANETLYSAEKAKGEGYIPFKSSDAKIQDVTKYGGFTSVTGAYFFLVEHDEKKKRIRTIESVPLYLADKIDKDSLELERYCDKLGLVNYDVRVRKIKIGSLLNRNGYFAYLTGKTGKQLILRNATNLCLDKKWTIYIKKIEKYKETNVLDSIITSETMVNLYNELLNKFTVGIYGRRPNPIGEKMNSARDKFASLSIENQCLALYQILQLSAILGNESDLQLIGASTHAGKMLISKKIGTDEIYLINQSPTGLFETKIDLQTI

SEQ ID NO: 3026 - protein, 1359 aa, unidentified
  REGION 1..1359: note = Category: MG91 effectors
  REGION 1..1359: note = Description: MG91-218 effector
  source 1..1359: note = uncultivated organism sequence
MLEKPYYLGLDMGTNSVGWAVTDQQYNLLKAKGKDLWGIREFAEADTSVERRTHRISRRRRQREQARIGLLNDYFHDAIIAIDPSFFQRLENSKYHLEDKDQNVRYKYNIFNDPDYTDADYYTQYPTIYHLRKELLENPKPHDVRLVYLALLNMFKHRGHFLNSGISDGNNERSLKDAYINFAISVSELTEDYFNQDVDYSTIEGILSSRDLNRTKKAEELSTVLGIDFKNKKYKEYLRAICGLKINAYTLFSDQLPDDTTKIDLCVSDASFDEKSEELVSLIGEDLFQIILNIKEIYDIGSLAGILKGYTYLSQARVAAYDKHKHDLKLLKSSIKKYCTKEEYNNFFNSDADGSYASYIGSFNSGNKERRVGSKRTSEDLYKEIKKLLKGANKSDPAINEIFTSIETESFLPKQLTASNGIIPNQVHSKEMARILTNAENYLPFLKETDENNLSISNRILQLYKFQIPYYIGPVTEKSQRDGGNGWVIRKDNGRVFPWNIEEKIDVKATSEAFISRMVRRCTYMNGKQVLPKASLEYESFRVLNEINNLRIDGERIPVTLKQDIYTDLFQKGKKVTKKQLCNYLATRGLIESSEQVTGIDIAINNSLSTYGKFKAIFGEDIKLDHIQHMIEDIVFWCTVYGDSKQFLKEQIEDKYKGKLSPEQMKRILGFKFKDWGNLSKEFFELKGADKSTGEAVSIIRALWENNLNLMELINSPEFDFKEQLADYEANSLKTLSDFEPEDLNDYYFSAPVRRMIWQTTLIIKELVHVLGKEPARIFIEMTREKDASRGRTLSRKKKFEDLYKNVKDENTDWAKVIEHADESGTIRSKKMYLYLTQKGRCMYTGNHIELSDLFNDNLYDIDHIYPRYFVKDDNIDNNLVLVTKEKNAHKSDNYPLEAEIFNKQRNMWTQLRKEGFISEEKYNRLMGRNAFTDEQKAGFIARQLVETSQGTKGVAELFHQLLPNSKIVYAKAGNVSDFRRNRELPKSRLVNDFHHAHDAYLNIVVGNVYYVKFTQNPINYIKNSYNKDMNKNNYNLSRMFDWDVKRGDEVAWIAQKQDGATGTISTVKKMLSKNTPLMTRLSYEGKGALANETLYSAEKAKGEGYIPFKSSDTKIQDVTKYGGFTSVTGAYFFLVEHDEKKKRIRTIESVPLYLADKIDKDSSELERYCDKLGLVNYDIRVRKIKIGSLLNRNGYFAYLTGKTGKQLILRNATNLCLDKKWTRYIKKIEKYKETNVLDSIITSETMVNLYNELLNKFTVGIYGRRPNPIGEKMDSAKNTFTSYTLDNQCNLIYQILQLSKILGFETDLSLLRTNKQSGKPTREGGMQISKKIDNTTSMYLINQSPTGLFETKIDLQTI

SEQ ID NO: 3027 - protein, 1358 aa, unidentified
  REGION 1..1358: note = Category: MG91 effectors
  REGION 1..1358: note = Description: MG91-219 effector
  source 1..1358: note = uncultivated organism sequence
MEKEYYLGLDMGTNSVGWAVTDDAYNLIRFKGKDMWGIREFDEANPAVERRTHRTSRRREQRNAVRMGLIRSYFADEIQKVDSNFYQRLDNSFFHVEDKQDNVKDKNGIFNDKNYKDADYYKQYPTIFHLRKELIEDASQKDVRLVYLAVANMFKHRGHFLLSGIGSESSKQTITDLYNQVSGLITEEYGISLKTDIAGTDFEQVLCSREYSRTRKSEKVCEILEIKNSDKLKKAFVKSMCGLSVKITDVIDDTFTEISDEDKKITFSFVDSDYDEKAGVLEEKLGTDVYDIISKLKEIHDKAQVAEIMKNYQYLSFARVADYEKHKKDLKILKRVVKKYFEPTVYDKLFRSGENGTYSAYVNSFNSGEKSRRNYKERKQEDLYNSIKKLLKSIDNVCDTDIEYIKNEIEKENFLPKQLTFKNGVIPNQIHASELKAILKNAEKYLPFLNEKDESGYTVSERILMLFSFQIPYYVGPVSSNSNGWVKRLEPGQVLPWNIDKKIDLKETSEQFIQRMVRNCTYIAGEKVLPKASLLYENFKVLNEINNLSINGERIAVALKQDLYNTLFLKGKRVTRKQIFNYFHSRGLVEEDSQISGIDIAVNNSLSTYGKFLPLFGEHLKEDKYKKMVDDIVFWCTLYGDSRKFLREQLEEKYSDVLDENQIKRITGMKFKDWGNLSKEFLELLGCCKSTGEMIPLIRAMWETNYNLMELLHSEEFTYSEELEEKQGKIEKVLSEYTIDDLNEEYFSAHVKRMVWQTLLIIKEIEKIMKCPPTRIFVEMTRKDDEKGDNGRKSSRKDQLLALYKKIQSEDKEWKKEMSSRIEDYDKNGALRSKKLYLYFIQKGLDMYTGKPIDLDNLMSANSNYDIDHIYPRHFVKDDNINNNLVLASKPANAEKSDIYPIKDSIYQKMKYTWKVLRDEGLITEEKYKRLTGRNPFTDEQKAGFIARQLVETGQGTKGVADLLTALLPDTKLVYSKAGNVSDFRKRYDIPKSRLINDFHHAHDAYLNIVVGNIYFTKFTSNPLNYIRKECSSKDNKYQYNLGNMYKWDVKRDGKTAWIAAKEGETGTLATVKKMLSRNTPILTRLAIEGHGGIADATLYSHKKAKQDAYIPLKSSDARMADVTKYGGYSSVTTAYLFLVEHEIKGKKIRTLETVPLYLKDRLENSKEKLEEYCRETLGYTNPSVRMKKIKLQSLIKLNGYYMQISGKTNKQFTVRNYVQFCLNSKWVDYIHKLEKYQDKGVIDDAITDEKNVELYNVLCEKHSVGIFTLRPNPVGDKIKKGYDKFVNLTTEEQIKLLIEIIKLTCVGIVSANLTLIGGASISGKMLISKNITDAKECLLINQSVTGLYENRIDLLRV

SEQ ID NO: 3028 - protein, 1332 aa, unidentified
  REGION 1..1332: note = Category: MG91 effectors
  REGION 1..1332: note = Description: MG91-220 effector
  source 1..1332: note = uncultivated organism sequence
MLNTPYYLGLDMGTNSVGWAVTDKNYNLLRAKGKDLWGIREFSDSATSVDRRSYRIRRRRRQREQARIGLLKYYFNDSIIAKDPSFFQRLENSKYHLEDKDEAVKYKFNIFNDKTYTDIDYYTQYPTIYHLRKELLESSEPHDVRLVYLALLNMFKHRGHFLNAEIGDVAEERKLKDAYIDFCSCVSELTNESFNLDIDYSAVEEILSSRDISRTKKSEALASILNIDVKNKKYKEYVKAICGLKVNAYTLFSEQLSDEVKRIDICVSDASFDTKREDYISILGEDLFQIILYIKEIYDIGSLAGILKGYSYLSFARVATYEKHKSDLRKLKDCIRKYCSKEDYNQFFNSDAAGFYASYIGSFNSGKKQRRVGKNTTSEDLYKEIKKILKNADKNDPAIIDIFSSIDTESFLPKQLTASNGVIPNQVHYKEMAKILSNAESYLPFLREKNESNLSVSERILQIYKFQIPYYIGPVTEKSHRDGGNGWVIRKSNGRVLPWNINEKIDVKATSEAFISRMVRRCTYMNGAQVLPKASLEYESFRVLNEINNLRIDGERIPVDLKQAIYIDIFQKGKKITADILHKYLFNKGYIQSSEQVTGIDININNSLSTYGKFKVIFGEDIKLDSVQHMIEDIVFWCTVYGDSKKFLQEQIEEKYSDKISKEQLKRILGFKFKDWGSLSKEFFELKATDKSTGENISIIRALWENNLNLMELINSSKFNFKERLEEYRITSLKTLSDFEPEDLREYYFSAPVRKMIWQTMLVIKELVHVLGHEPERIFIEIPRDKDPSIGRTISRKKKFEELYKNVKDESVDWMNVIEHADDSGSLRSKKMYLYLTQKGRCMYTGEHIELSDLFNKSLYDIDHIYPRHFVKDDNIDNNLVLVKREKNAHKSDNYPLEAEIFNNQKKMWAQLRKEDFINEEKYKRLMGRNPFTDEQKAGFIARQLVETQQGTKGVAELLQQLLPNSKIVYTKAGNVSDFRHSREIPKSRLINDFHHAHDAYLSIVVGNVYYVKFTQNPINFIKNAYNKDSSKNNYNLTRMFDWDVKRRDEVAWIAQNKNGTVGTIAIVKKMLKRNTPLMTRLSYEGKGGLTKETLYSAEKAKGEGYIPFKSSDKKMQDVTKYGGFTSVKGAYFFLVEHDEKKKQIRTIESVPLYLADKIEKDPAELERYCQKLGLVNYNIRVRKIKIGTLIKRNGYFAYLTGKTGKQLILRNATNLCLDSKWGTYIKKIEKYKDTGVLDNTLDTDTNIKLYNELLDKFTTGIYGKRPNPIGDKMLSAKNTFTSFTLDNQCNLIYQILQLSKILGFETDLSLLHTNKKSDKPTREGGMQISKK

SEQ ID NO: 3029 - protein, 1352 aa, unidentified
  REGION 1..1352: note = Category: MG91 effectors
  REGION 1..1352: note = Description: MG91-221 effector
  source 1..1352: note = uncultivated organism sequence
MTAFKYYLGLDMGTNSVGWAATDPEYRLLKAKGKDLWGIREFNEASGAVERRTHRISRRRRQREQVRIGILKDYFHDAICEVDPGFFRRLENSKYHEEDKDVEVRYKNNIFNDRNYTDKDYFNEYPTIYHLRNELISSTEKHDVRLVFLALLNMFKHRGHFLNAGLGENNGESNIDNAYFELTELLSELTEYHLSQDIDCKQIEAILSRRDMSRTHKAEELAGVLHVDLKNKPYKELIRGLCGLKFNACVVFPDVQSEEVTKLDICLSESTFDEKSDEIANIIGEDYFEIIMAMKEMFDIGSLASIMKGHNYLSQARVASYTKHKEDLKLLKEVIKKYCGKKEYDKFFNSDADGSYASYVGSYNSKNKERRVGNKRTSEELYKEIKKLLKDAQKEDENVQKILTSIENETFLPKQLTASNGVIPNQVHAREMKKILSNAENYLPFLTEKDETGLSVSERILKLFTFQIPYYVGPTSENSGKNGGNGWVVRREDGQVLPWNIDEKIDMKATSEAFISRMVRRCTYISGEQVLPKASLEYQSYCVLNEINNIKIDGERISVELKQDIYKAVFQKGKKVTKKQLCKYLHTRGIIETEEQVTGVDVSINNALTTYGKFKPIFGEDISKDSVQKMIEDIVFWCTVYGDSKKFLKDRIEEKYGNKLSEEQIKRILGFKFKDWGNLSKKFLELNGADTSTGESISIIRALWNNNLNLMELINSSLYNYKECLAEYQNTMLKTLSEIEAEDLNEYYFSAPVRRMIWQTILVIKELVKVLGCEPERIFVEMTRKPDEHKTRTSSRRNKFEELYKKVKDETTDWMQVIANAEEDGKIRSKKMYLYLTQKGRCMYTGKHIELDDLFDNNLYDIDHIYPRHFVKDDNIDNNLVLVCKEKNAHKSDHYPIEEEIFLSQKKMWLELRKSGFITEEKYNRLMDRNPFSDEQKAGFIARQLVETSQGTKGVANILRQLLPGSKIVYAKASNVSEFRCTRDDIQKSRLVNDFHHAHDAYLNIVVGNVYYVKFTQNPLNFIKKDYDKYKEDYNLSKMFDWDVKRNGEVAWIAQRKDGAAGTITTVKRMLSRNTPLMTRYSFDGKGGLTNETLYSAKKAKGEGYIPFKSSDDKMQDVTKYGGFTSVTGAYFFLVEHTEKKKRIRTIESVPVYLAQKIEQNPDELKKYCEEILGLIDADIRLKKIKIGSLIKRNGYFCYITGKTVNRLIVRNAVNLCLKNEWIKYISKLEKVKEKDAVDKIITKEKNEVLYSELIQKFKHGIFSKRPNPVGDKLEKDSEKFNNLSIKDQCAVLCQVLRMAAILGSECDMTLLGDSPNCGKMLISKKIGDEEIYLINQSVTGLYEKKINLHTV

SEQ ID NO: 3030 - protein, 1358 aa, unidentified
  REGION 1..1358: note = Category: MG91 effectors
  REGION 1..1358: note = Description: MG91-222 effector
  source 1..1358: note = uncultivated organism sequence
MEKEYYLGLDMGTNSVGWAVTDDAYNLIRFKGKDMWGIREFDEANPAVERRTHRTSRRREQRNAVRMGLIRSYFADEIQKVDSNFYQRLDNSFFHVEDKQDNVKDKNGIFNDKNYKDADYYKQYPTIFHLRKELIEDASQKDVRLVYLAVANMFKHRGHFLLSGIGSESSKQTITDLYNQVSGLITEEYGISLKTDIAGTDFEQVLCSREYSRTRKSEKVCEILEIKNSDKLKKAFVKSMCGLSVKITDIIDDTFTEISDEDKKITFSFVDSDYDEKAGVLEEKLGTDVYDIISKLKEIHDKAQVAEIMKNYQYLSFARVADYEKHKKDLKILKRVVKKHFEPTVYDKLFRSEENGTYSAYVNSFNSEEKSRRNYKERKQEDLYNSIKKLLKSVDNVDDTDIEYIKNEMDKENFLPKQLTFKNGVIPNQIHASELKAILKNAEKYLPFLNEKDESGYTVSERILMLFSFQIPYYVGPVSSNSNGWVKRLESGQVLPWNIDKKIDLKETSEQFIQRMVRNCTYIAGEKVLPKASLLYENFKVLNEINNLSINGERIAVALKQDLYNTLFLKGKRVTRKQIFNYFHSRGLVEEDSQISGIDIAVNNSLSTYGKFLPLFGEHLKEDKYKKMVDDIVFWCTVYGDSRKFLREQLEEKYSDVLDENQIKRITGMKFKDWGNLSKEFLELLGCCKSTGEMIPLIRAMWETNYNLMELLHSEEFTYSEELEEKQGKIEKVLSEYTIDDLNEEYFSAHVKRMVWQTLLIIKEIEKIMKCPPTRIFVEMTRKDDEKGDNGRKSSRKDQLLALYKKIQSEDKEWKKEMSSRIEDYDKNGALRSKKLYLYFIQKGLDMYTGKPIDLDNLMSANSNYDIDHIYPRHFVKDDNINNNLVLASKPANAEKSDIYPIKDSIYQKMKYTWKVLRDEGLITEEKYKRLTGRNPFTDEQKAGFIARQLVETGQGTKGVADLLTALLPDTKLVYSKAGNVSDFRKRYDIPKSRLINDFHHAHDAYLNIVVGNIYFTKFTSNPLNYIRKECSSKDNKYQYNLGNMYKWDVKRDGKTAWIAAKEGETGTLATVKKMLSRNTPILTRLAIEGHGGIADATLYSHKKAKQDAYIPLKSSDARMADVTKYGGYSSVTTAYLFLVEHEIKGKKIRTLETVPLYLKDRLENSKEKLEEYCRETLGYTNPSVRMKKIKLQSLIKLNGYYMQISGKTNKQFTVRNYVQFCLNSKWVDYIHKLEKYQDKGVIDDAITDEKNVELYNVLCEKHSVGIFTLRPNPVGDKIKKGYDKFVNLTTEEQIKLLIEIIKLTCVGIVSANLTLIGGASISGKMLISKNITDAKECLLINQSVTGLYENRIDLLRV

SEQ ID NO: 3031 - protein, 1352 aa, unidentified
  REGION 1..1352: note = Category: MG91 effectors
  REGION 1..1352: note = Description: MG91-223 effector
  source 1..1352: note = uncultivated organism sequence
MTAFKYYLGLDMGTNSVGWAATDPEYRLLKAKGKDLWGIREFNEASGAVERRTHRISRRRKQREQVRIGILKDYFHDAICEVDPSFFQRLENSKYHEEDKDVEVRYKNNIFNDSNYTDKDYFNEYPTIYHLRNELISSTEKHDVRLVFLALLNMFKHRGHFLNAGLGENNGESNIDNAYFELTELLSELTEYHLSQDIDCKQIEAILSRRDMSRTHKAEELAGVLHVDLKNKPYKELIRGLCGLKFNACVVFPDVQSEEVTKLDICLSESTFDEKSDEIANIIGEDYFEIIMAMKEMFDIGSLASIMKGHNYLSQARVASYTKHKEDLKLLKEVIKKYCGKKEYDKFFNSDADGSYASYVGSYNSKNKERRVGNKRTSEELYKEIKKLLKDAQKEDENVQKILTSIENETFLPKQLTASNGVIPNQVHAREMKKILSNAENYLPFLTEKDETGLSVSERILKLFTFQIPYYVGPTSENSGKNGGNGWVVRREDGQVLPWNIDEKIDMKATSEAFISRMVRRCTYISGEQVLPKASLEYQSYCVLNEINNIKIDGERISVELKQDIYKAVFQKGKKVTKKQLCKYLHTRGIIETEEQVTGVDVSINNALTTYGKFKPIFGEDISKDSVQKMIEDIVFWCTVYGDSKKFLKDRIEEKYGNKLSEEQIKRILGFKFKDWGNLSKKFLELNGADTSTGESISIIRALWNNNLNLMELINSSLYNYKECLAEYQNTMLKTLSEIEAEDLNEYYFSAPVRRMIWQTILVIKELVKVLGCEPERIFVEMTRRPDEHKTRTSSRRNKFEELYKKVKDETTDWMQVIANAEEDGKIRSKKMYLYLTQKGRCMYTGKHIELDDLFDNNLYDIDHIYPRHFVKDDNIDNNLVLVCKEKNAHKSDHYPIEEEIFLSQKKMWLELRKSGFITEEKYNRLMGRSPFSDEKKAGFIARQLVETSQGTKGVANILRQLLPGSKIVYAKASNVSEFRHTRDDIPKSRLVNDFHHAHDAYLNIVVGNVYYVKFTQNPLNFIKKDYDKYKEDYNLSKMFDWDVKRNGEVAWIAQRKDGEAGTITTVKKMLSRNTPLMTRYSFEGKGGLANETLYSAKKAKGEGYIPFKSSDDKMQDVTKYGGFTKVTGAYFFLVEHTEKKKRIRTIESVPVYLAQKIEQNPDELKKYCEEILGLVDADIRLKKIKIGSLIKRNGYFCYITGKTGNRLSVRNAVNLCLKNEWIKYISKLEKVKEKDTVDEIITKEKNEVLYSELIQKFKHGIFSKRPNPVEDKLEKGSEKFSNLSIKEQCAVLCQILQLAAVLGSECDMTLLGESAHCGKMLISKKIGDEEIYLLNQSVTGLYEKKINLHTV

SEQ ID NO: 3032 - protein, 1352 aa, unidentified
  REGION 1..1352: note = Category: MG91 effectors
  REGION 1..1352: note = Description: MG91-224 effector
  source 1..1352: note = uncultivated organism sequence
MTAFKYYLGLDMGTNSVGWAATDPEYRLLKAKGKDLWGIREFNEASGAVERRTHRISRRRRQREQVRIGILKDYFHDAICEVDPSFFQRLENSKYHEEDKDVEVRYKNNIFNDSNYTDKDYFNEYPTIYHLRNELISSTEKHDVRLVFLALLNMFKHRGHFLNAGLGENNGESNIDNVYFELTELLSELTEYHLSQDIDCKQIEAILSRRDMSRTHKAEELAGVLHVDLKNKPYKELIRGLCGLKFNACVVFPDVQSEEVTKLDICLSESTFDEKSDEIANIIGEDYFEIIMAMKEMFDIGSLASIMKGHNYLSQARVASYTKHKEDLKLLKEVIKKYCGKKEYDKFFNSDADGSYASYVGSYNSKNKERRVGNKRTSEELYKEIKKLLKDAQKEDENVQKILTSIENETFLPKQLTASNGVIPNQVHAREMKKILSNAENYLPFLTEKDETGLSVSERILKLFTFQIPYYVGPTSENSGKNGGNGWVVRREDGQVLPWNIDEKIDMKATSEAFISRMVRRCTYISGEQVLPKASLEYQSYCVLNEINNIKIDGERISVELKQDIYKAVFQKGKKVTKKQLCKYLHTRGIIETEEQVTGVDVSINNALTTYGKFKPIFGEDISKDSVQKMIEDIVFWCTVYGDSKKFLKDRIEEKYGNKLSEEQIKRILGFKFKDWGNLSKKFLELNGADTSTGESISIIRALWNNNLNLMELINSSLYNYKECLAEYQNTMLKTLSEIEAEDLNEYYFSAPVRRMIWQTILVIKELVKVLGCEPERIFVEMTRKPDEHKTRTSSRRNKFEELYKKVKDETTDWMQVIANAEEDGKIRSKKMYLYLTQKGRCMYTGKHIELDDLFDNNLYDIDHIYPRHFVKDDNIDNNLVLVCKEKNAHKSDHYPIEEEIFLSQKKMWLELRKSGFITEEKYNRLMDRNPFSDEQKAGFIARQLVETSQGTKGVANILRQLLPGSKIVYAKASNVSEFRCTRDDIQKSRLVNDFHHAHDAYLNIVVGNVYYVKFTQNPLNFIKKDYDKYKEDYNLSKMFDWDVKRNGEVAWIAQRKDGAAGTITTVKRMLSRNTPLMTRYSFDGKGGLTNETLYSAKKAKGEGYIPFKSSDDKMQDVTKYGGFTSVTGAYFFLVEHTEKKKRIRTIESVPVYLAQKIEQNPDELKKYCEEILGLIDADIRLKKIKIGSLIKRNGYFCYITGKTVNRLIVRNAVNLCLKNEWIKYISKLEKVKEKDAVDKIITKEKNEVLYSELIQKFKHGIFSKRPNPVGDKLEKDSEKFNNLSIKDQCAVLCQVLRMAAILGSECDMTLLGDSPNCGKMLISKKIGDEEIYLINQSVTGLYEKKINLHTV

SEQ ID NO: 3033 - protein, 1352 aa, unidentified
  REGION 1..1352: note = Category: MG91 effectors
  REGION 1..1352: note = Description: MG91-225 effector
  source 1..1352: note = uncultivated organism sequence
MTAFKYYLGLDMGTNSVGWAATDPEYRLLKAKGKDLWGIREFNEASGAVERRTHRISRRRRQREQVRIGILKDYFHDAICEVDPSFFQRLENSKYHEEDKDVEVRYKNNIFNDSNYTDKDYFNEYPTIYHLRNELISSTEKHDVRLVFLALLNMFKHRGHFLNAGLGENNGESNIDNVYFELTELLSELTEYHLSQDIDCKQIEAILSRRDMSRTHKAEELAGVLHVDLKNKPYKELIRGLCGLKFNACVVFPDVQSEEVTKLDICLSESTFDEKSDEIANIIGEDYFEIIMAMKEMFDIGSLASIMKGHNYLSQARVASYTKHKEDLKLLKEVIKKYCGKKEYDKFFNSDADGSYASYVGSYNSKNKERRVGNKRTSEELYKEIKKLLKDAQKEDENVQKILTSIENETFLPKQLTASNGVIPNQVHAREMKKILSNAENYLPFLTEKDETGLSVSERILKLFTFQIPYYVGPTSENSGKNGGNGWVVRREDGQVLPWNIDEKIDMKATSEAFISRMVRRCTYISGEQVLPKASLEYQSYCVLNEINNIKIDGERISVELKQDIYKAVFQKGKKVTKKQLCKYLHTRGIIETEEQVTGVDVSINNALTTYGKFKPIFGEDISKDSVQKMIEDIVFWCTVYGDSKKFLKDRIEEKYGNKLSEEQIQRILGFKFKDWGNLSKKFLELNGADTSTGESISIIRALWNNNLNLMELINSSLYNYKECLAEYQNTMLKTLSEIEAEDLNEYYFSAPVRRMIWQTILVIKELVKVLGCEPERIFVEMTRKPDEHKTRTSSRRNKFEELYKKVKDETTDWMQVIANAEEDGKIRSKKMYLYLTQKGRCMYTGKHIELDDLFDNNLYDIDHIYPRHFVKDDNIDNNLVLVCKEKNAHKSDHYPIEEEIFLSQKKMWLELRKSGFITEEKYNRLMGRNPFSDEQKAGFIARQLVETSQGTKGVANILRQLLPGSKIVYAKASNVSEFRRTRDDIPKSRLVNDFHHAHDAYLNIVVGNVYYVKFTQNPLNFIKKDYDNYKEDYNLSKMFDWDVKRNGEVAWIAQRKDGEAGTITTVKKMLSRNTPLMTRYSFEGKGGLANETLYSAKKAKGEGYIPFKSSDDKMQDVTKYGGFTSVTGAYFFLVEHAEKKKRIRTIESVPVYLAQKIEQNPDELKKYCEEILGLIDADIRLKKIKIGSLIKRNGYFCYITGKTGKQLIVRNAVNLCLKNEWIKYISKLEKVKEKDAVDKIITKEKNEVLYSELIQKFKHGIFSKRPNPVGDKLEKGSEKFSNLSIKEQCTVLCQILQLAAVLGSECDMTLLGESAHCGKMLISKKIGDEEIYLINQSVTGLYEKKINLHTV

SEQ ID NO: 3034 - protein, 1352 aa, unidentified
  REGION 1..1352: note = Category: MG91 effectors
  REGION 1..1352: note = Description: MG91-226 effector
  source 1..1352: note = uncultivated organism sequence
MTAFKYYLGLDMGTNSVGWAATDPEYRLLKAKGKDLWGIREFNEASGAVERRTHRISRRRRQREQVRIGILKDYFHDAICEVDPGFFRRLENSKYHEEDKDVEVRYKNNIFNDSNYTDKDYFNEYPTIYHLRNELISSTEKHDVRLVFLALLNMFKHRGHFLNAGLGENNGESNIDNAYFELTELLSELTEYHLSQDIDCKQIEAILSRRDMSRTHKAEELAGVLHVDLKNKPYKELIRGLCGLKFNACVVFPDVQSEEVTKLDICLSESTFDEKSDEIANIIGEDYFEIIMAMKEMFDIGSLASIMKGHNYLSQARVASYTKHKEDLKLLKEVIKKYCGKKEYDKFFNSDADGSYASYVGSYNSKNKERRVGNKRTSEELYKEIKKLLKDAQKEDENVQKILTSIENETFLPKQLTASNGVIPNQVHAREMKKILSNAENYLPFLTEKDETGLSVSERILKLFTFQIPYYVGPTSENSGKNGGNGWVVRREDGQVLPWNIDEKIDMKATSEAFISRMVRRCTYISGEQVLPKASLEYQSYCVLNEINNIKIDGERISVELKQDIYKAVFQKGKKVTKKQLCKYLHTRGIIETEEQVTGVDVSINNALTTYGKFKPIFGEDISKDSVQKMIEDIVFWCTVYGDSKKFLKDRIEEKYGNKLSEEQIKRILGFKFKDWGNLSKKFLELNGADTSTGESISIIRALWNNNLNLMELINSSLYNYKECLAEYQNTMLKTLSEIEAEDLNEYYFSAPVRRIIWQTILVIKELVKVLGCEPERIFVEMTRKPDEHKTRTSSRRNKFEELYKKVKDEATDWMQVIAKAEEDGKIRSKKMYLYLTQKGRCMYTGKHIELDDLFDKNLYDIDHIYPRHFVKDDNIDNNLVLVCKEKNAHKSDHYPIEEEIFLSQKKMWLELRKSGFITEEKYNRLMGRSPFSDEQKAGFIARQLVETSQGTKGVANILRQLLPGSKIVYAKASNVSEFRHTRDDIPKSRLVNDFHHAHDAYLNIVVGNVYYVKFTQNPLNFIKKDYDKYKEDYNLSKMFDWDVKRNGEVAWIAQRKDGEAGTITTVKRMLSRNTPLMTRYSFEGKGGLANETLCSAKKAKGEGYIPFKSSDDKMQDVTKYGGFTKVTGAYFFLVEHTEKKKRIRTIESVPVYLAQKIEQNPDELKKYCEEILGLVDADIRLKKIKIGSLIKRNGYFCYITGKTGNRLSVRNAVNLCLKNEWIKYISKLEKVKEKDAVDEIITKEKNEVLYSELIQKFKHGIFSKRPNPVEDKLEKGSEKFSNLSIKEQCAVLCQILQLAAVLGSECDMTLLGESAHCGKMLISKKIGDEEIYLINQSVTGLYEKKINLHTV

SEQ ID NO: 3035 - protein, 1352 aa, unidentified
  REGION 1..1352: note = Category: MG91 effectors
  REGION 1..1352: note = Description: MG91-227 effector
  source 1..1352: note = uncultivated organism sequence
MLEKPYYLGLDMGTNSVGWAVTDQQYNLLKAKGKDLWGIREFAEADTSVERRTHRISRRRRQREQARIGLLNDYFHDAIIAIDPSFFQRLENSKYHLEDKDQNVRYKYNIFNDPDYTDADYYTQYPTIYHLRKELLENPKPHDVRLVYLALLNMFKHRGHFLNSGISDGNNERSLKDAYINFAISVSELTEDYFNQEVDYSTIEGILSSRDLNRTKKAEELSTVLGIDFKNKKYKEYLRAICGLKINAYTLFSDQLPDDTTKIDLCVSDASFDEKSEELVSLIGEDLFQIILNIKEIYDIGSLAGILKGYTYLSQARVAAYDKHKHDLKLLKSSIKKYCTKEEYNNFFNSDADGSYASYIGSFNSGNKERRVGSKRTSEDLYKEIKKLLKGANKSDPAINEIFTSIETESFLPKQLTASNGIIPNQVHSKEMARILTNAENYLPFLKETDENNLSISNRILQLYKFQIPYYIGPVTEKSQRDGGNGWVIRKDNGRVFPWNIEEKIDVKATSEAFISRMVRRCTYMNGKQVLPKASLEYESFRVLNEINNLRIDGERIPVTLKQDIYTDLFQKGKKVTKKQLCNYLATRGLIESSEQVTGIDIAINNSLSTYGKFKAILGEDIKLDHIQHMIEDIVFWCTVYGDSKQFLKEQIEDKYKGKLSPEQMKRILGFKFKDWGNLSKEFFELKGADKSTGEAVSIIRALWENNLNLMELINSPEFDFKEQLADYEANSLKTLSDFEPEDLNEYYFSAPVRRMIWQTTLIIKELVHVLGKEPARIFIEMTREKDASRGRTLSRKKKFEDLYKNVKDENTDWAKVIEHADESGTIRSKKMYLYLTQKGRCMYTGNHIELSDLFNDNLYDIDHIYPRHFVKDDNIDNNLVLVTKEKNAHKSDNYPLEAEIFNKQRNMWTQLRKEGFISEEKYNRLMGRNAFTDEQKAGFIARQLVETSQGTKGVAELFHQLLPNSKIVYAKAGNVSDFRRNRELPKSRLVNDFHHAHDAYLNIVVGNVYYVKFTQNPINYIKNSYNKDMNKNNYNLSRMFDWDVKRGDEVAWVAQKQDAAAGTISTVKKMLSKNTPLMTRLSYEGKGALANETLYSAEKAKGEGYIPFKSSDAKIQDVTKYGGFTSVTGAYFFLVEHDEKKKRIRTIESVPLYLADKIDKDSSELERYCDKLGLVNYDVRVRKIKIGSLLNRNGYFAYLTGKTGKQLILRNATNLCLDKKWTIYIKKIEKYKETNVLDSIITSETMVNLYNELLNKFTVGIYGRRPNPIGEKMNSARDKFASLSIENQCLALYQILQLSAILGNESDLQLIGASTHAGKMLISKKIGTDEIYLINQSPTGLFETKIDLQTI

SEQ ID NO: 3036 - protein, 1358 aa, unidentified
  REGION 1..1358: note = Category: MG91 effectors
  REGION 1..1358: note = Description: MG91-228 effector
  source 1..1358: note = uncultivated organism sequence
MEKEYYLGLDMGTNSVGWAVTDDAYNLIRFKGKDMWGIREFDEANPAVERRTHRTSRRREQRNAVRMGLIRSYFADEIQKVDSNFYQRLDNSFFHVEDKQDNVKDKNGIFNDKNYKDADYYKQYPTIFHLRKELIEDASQKDVRLVYLAVANMFKHRGHFLLSGIGSESSKQTITDLYNQVSGLITEEYGISLKTDIAGTDFEQVLCSREYSRTRKSEKVCEILEIKNSDKLKKAFVKSMCGLSVKITDVIDDTFTEISDEDKKITFSFVDSDYDEKAGVLEEKLGTDVYDIISKLKEIHDKAQVAEIMKNYQYLSFARVADYEKHKKDLKILKRVVKKYFEPTVYDKLFRSGENGTYSAYVNSFNSGEKSRRNYKERKQEDLYNSIKKLLKSIDNVCDTDIEYIKNEIEKENFLPKQLTFKNGVIPNQIHASELKAILKNAEKYLPFLNEKDESGYTVSERILMLFSFQIPYYVGPVSPNSNGWVKRLEPGQVLPWNIDKKIDLKETSEQFIQRMVRNCTYIAGEKVLPKASLLYENFKVLNEINNLSINGERIAVALKQDLYNTLFLKGKRVTRKQIFNYFHSRGLVEEDSQISGIDIAVNNSLSTYGKFLPLFGEHLKEDKYKKMVDDIVFWCTVYGDSRKFLREQLEEKYSDVLDENQIKRITGMKFKDWGNLSKEFLELSGCCKSTGEMIPLIRAMWETNYNLMELLHSEEFTYSEELEEKQGKIEKVLSEYTIDDLNEEYFSAPVKRMVWQTLLIIKEIEKIMKCPPTRIFVEMTRKDDEKGDNGRKSSRKDQLLALYKKIQSEDKEWKKEMSSRIEDYDKNGALRSKKLYLYFIQKGLDMYTGKPIDLDNLMSANSNYDIDHIYPRHFVKDDNINNNLVLASKPANAEKSDIYPIKDSIYQKMKYTWKVLRDEGFITEEKYKRLTGRNPFTDEQKAGFIARQLVETGQGTKGVADLLTALLPDTKLVYSKAGNVSDFRKKYDIPKSRLINDFHHAHDAYLNIVVGNIYFTKFTSNPLNYIRKECSSKDNKYQYNLGNMYKWDVKRDGKTAWIAAKEGETGTIATVKKILSRNTPTLTRLTIEGHGGIADATLYSHKKAKQDAYIPLKSSDARMADVTKYGGYSSVTTAYLFLVEHEIKGKKIRTLETVPLYLKDRLENSKEKLEEYCRETLGYTNLSVRMKKIKLQSLIKLNGYYMQISGKTNKQFTVRNYVQFCLNSKWVDYIHKLEKYQDKGVIDDAITDEKNVELYNVLCEKHSVGIFTLRPNPVGDKIKKGYDKFVNLTTEEQIKLLIEIIKLTCVGIVSANLTLIGGAAISGKMLISKNITDAKECLLINQSVTGLYENRIDLLRV

SEQ ID NO: 3037 - protein, 1352 aa, unidentified
  REGION 1..1352: note = Category: MG91 effectors
  REGION 1..1352: note = Description: MG91-229 effector
  source 1..1352: note = uncultivated organism sequence
MLEKPYYLGLDMGTNSVGWAVTDQQYNLLKAKGKDLWGIREFAEADTSVERRTHRISRRRRQREQARIGLLNDYFHDAIIAIDPSFFQRLENSKYHLEDKDQNVRYKYNIFNDPDYTDADYYTQYPTIYHLRKELLENPKPHDVRLVYLALLNMFKHRGHFLNSGISDGNNERSLKDAYINFAISVSELTEDYFNQDVDYSTIEGILSSRDLNRTKKAEELSTVLGIDFKNKKYKEYLRAICGLKINAYTLFSDQLPDDTTKIDLCVSDASFDEKSEELVSLIGEDLFQIILNIKEIYDIGSLAGILKGYTYLSQARVAAYDKHKHDLKLLKSSIKKYCTKEEYNNFFNSDADGSYASYIGSFNSGNKERRVGSKRTSEDLYKEIKKLLKGANKSDPAINEIFTSIETESFLPKQLTASNGIIPNQVHSKEMARILTNAENYLPFLKETDENNLSISNRILQLYKFQIPYYIGPVTEKSQRDGGNGWVIRKDNGRVFPWNIEEKIDVKATSEAFISRMVRRCTYMNGKQVLPKASLEYESFRVLNEINNLRIDGERIPVTLKQDIYTDLFQKGKKVTKKQLCNYLATRGLIESSEQVTGIDIAINNSLSTYGKFKAIFGEDIKLDHIQHMIDDIVFWCTVYGDSKQFLKEQIEDKYKGKLSPEQMKRILGFKFKDWGNLSKEFFELKGADKSTGEAVSIIRALWENNLNLMELINSPEFDFKEQLADYEANSLKTLSDFEPEDLNDYYFSAPVRRMIWQTTLIIKELVHVLGKEPARIFIEMTREKDASRGRTLSRKKKFEDLYKNVKDENTDWAKVIEHADESGTIRSKKMYLYLTQKGRCMYTGNHIELSDLFNDNLYDIDHIYPRHFVKDDNIDNNLVLVTKEKNAHKSDNYPLEAEIFNKQRNMWTQLRKEGFISEEKYNRLMGRNAFTDEQKAGFIARQLVETSQGTKGVAELFHQLLPNSKIVYAKAGNVSDFRRNREFPKSRLVNDFHHAHDAYLNIVVGNVYYVKFTQNPINYIKNSYNKDMNKNNYNLSRMFDWDVKRGDEVAWIAQKQDGAAGTISTVKKMLSKNTPLMTRLSYEGKGALANETLYSAEKAKGEGYIPFKSSDTKIQDVTKYGGFTSVTGAYFFLVEHDEKKKRIRTIESVPLYLADKIDKDSSELERYCDKLGLVNYDVRVRKIKIGSLIKYNGYFCYITGKTGYRLIVRNATNLCLASNWRKYIKKIEKYKETTIIDNVITAEENIKLYNELLNKFTVGIFGRRPNPIGEKMDSARDKFASLSIENQCLALYQILQLTAILGNESDLQLIGASTHAGKMLISKKIGTDEIYLINQSPTGLFETKIDLQTI

SEQ ID NO: 3038 - protein, 1352 aa, unidentified
  REGION 1..1352: note = Category: MG91 effectors
  REGION 1..1352: note = Description: MG91-230 effector
  source 1..1352: note = uncultivated organism sequence
MTAFKYYLGLDMGTNSVGWAATDPEYRLLKAKGKDLWGIREFNEASGAVERRTHRISRRRRQREQVRIGILKDYFHDAICEVDPSFFQRLENSKYHEEDKDVEVRYKNNIFNDSNYTDKDYFNEYPTIYHLRNELISSTEKHDVRLVFLALLNMFKHRGHFLNAGLGENNGESNIDNAYFELTELLSELTEYHLSQDIDCKQIEAILSRRDMSRTHKAEELAGVLHVDLKNKPYKELIRGLCGLKFNACVVFPDVQSEEVTKLDICLSESTFDEKSDEIANIIGEDYFEIIMAMKEMFDIGSLASIMKGHNYLSQARVASYTKHKEDLKLLKEVIKKYCGKKEYDKFFNSDADGSYASYVGSYNSKNKERRVGNKRTSEELYKEIKKLLKDAQKEDENVQKILTSIENETFLPKQLTASNGVIPNQVHAREMKKILSNAENYLPFLTEKDETGLSVSERILKLFTFQIPYYVGPTSENSGKNGGNGWVVRREDGQVLPWNIDEKIDMKATSEAFISRMVRRCTYISGEQVLPKASLEYQSYCVLNEINNIKIDGERISVELKQDIYKAVFQKGKKVTKKQLCKYLHTRGIIETEEQVTGVDVSINNALTTYGKFKPIFGEDISKDSVQKMIEDIVFWCTVYGDSKKFLKDRIEEKYGNKLSEEQIKRILGFKFKDWGNLSKKFLELNGADTSTGESISIIRALWNNNLNLMELINSSLYNYKECLAEYQNTMLKTLSEIEAEDLNEYYFSAPVRRMIWQTILVIKELVKVLGCEPERIFVEMTRKPDEHKTRTSSRRNKFEELYKKVKDETTDWMQVIANAEEDGKIRSKKMYLYLTQKGRCMYTGKHIELDDLFDKNLYDIDHIYPRHFVKDDNIDNNLVLVCKEKNAHKSDHYPIEEEIFLSQKKMWLELRKSGFITEEKYNRLMGRSPFSDEQKAGFIARQLVETSQGTKGVANILRQLLPGSKIVYAKASNVSEFRHTRDDIPKSRLVNDFHHAHDAYLNIVVGNVYYVKFTQNPLNFIKKDYDKYKEDYNLSKMFDWDVKRNGEVAWIAQRKDGEAGTITTVKRMLSRNTPLMTRYSFEGKGGLANETLCSAKKAKGEGYIPFKSSDDKMQDVTKYGGFTKVTGAYFFLVEHTEKKKRIRTIESVPVYLAQKIEQNPDELKKYCEEILGLVDADIRLKKIKIGSLIKRNGYFCYITGKTGNRLSVRNAVNLCLKNEWIKYISKLEKVKEKDAVDEIITKEKNEVLYSELIQKFKHGIFSKRPNPVEDKLEKGSEKFSNLSIKEQCAVLCQILQLAAVLGSECDMTLLGESAHCGKMLISKKIGDEEIYLLNQSVTGLYEKKINLHTV

SEQ ID NO: 3039 - protein, 1359 aa, unidentified
  REGION 1..1359: note = Category: MG91 effectors
  REGION 1..1359: note = Description: MG91-231 effector
  source 1..1359: note = uncultivated organism sequence
MQEKPYYLGLDMGTNSVGWAVTDQHYNLLKAKGKDLWGIREFIEADTSVERRTHRISRRRRQREQARIGLLNDYFHDAIIAIDPSFFQRLENSKYHLEDKDQNVRYKYNIFNDPDYTDADYYTQYPTIYHLRKELLENPKPHDVRLVYLALLNMFKHRGHFLNSGISDGNNERSLKDAYINFAISVSELTEDYFNQDVDYSTIEGILSSRDLNRTKKAEELSTVLGIDFKNKKYKEYLRAICGLKINAYTLFSDQLPDDTTKIDLCVSDASFDEKSEELVSLIGEDLFQIILNIKEIYDIGSLAGILKGYTYLSQARVAAYDKHKHDLKLLKSSIKKYCTKEEYNNFFNSDADGSYASYIGSFNSGNKERRVGSKRTSEDLYKEIKKLLKGANKSDPAINEIFTSIETESFLPKQLTASNGIIPNQVHSKEMARILTNAENYLPFLKETDENNLSISNRILQLYKFQIPYYIGPVTEKSQRDGGNGWVIRKDNGRVFPWNIEEKIDVKATSEAFISRMVRRCTYMNGKQVLPKASLEYESFRVLNEINNLRIDGERIPVTLKQDIYTDLFQKGKKVTKKQLCNYLATRGLIESSEQVTGIDIAINNSLSTYGKFKAIFGEDIKLDHIQHMIEDIVFWCTVYGDSKQFLKEQIEDKYKGKLSPEQMKRILGFKFKDWGNLSKEFFELKGADKSTGEAVSIIRALWENNLNLMELINSSEFDFKEQLADYEANSLKTLSDFEPEDLNDYYFSAPVRRMIWQTTLIIKELVHVLGKEPARIFIEMTREKDASRGRTLSRKKKFEDLYKNVKDENTDWAKVIEHADESGTIRSKKMYLYLTQKGRCMYTGNHIELSDLFNDNLYDIDHIYPRHFVKDDNIDNNLVLVTKEKNAHKSDNYPLEAEIFNKQRNMWTQLRKEGFISEEKYNRLMGRNAFTDEQKAGFIARQLVETSQGTKGVAELFHQLLPNSKIVYAKAGNVSDFRRNRELPKSRLVNDFHHAHDAYLNIVVGNVYYVKFTQNPINYIKNSYNKDMNKNNYNLSRMFDWDVKRGDEVAWIAQKQDGAAGTISTVKKMLSKNTPLMTRLSYEGKGALANETLYSAEKAKGEGYIPFKSSDTKIQDVTKYGGFTSVTGAYFFLVEHDEKKKRIRTIESVPLYLADKIDKDSSELERYCDKLGLVNYDVRVRKIKIGSLLNRNGYFAYLTGKTGKQLILRNATNLCLDKKWTRYIKKIEKYKETNVLDSIITSETMVNLYNELLNKFTVGIYGRRPNPIGEKMDSAKNTFTSYTLDNQCNLIYQILQLSKILGFETDLSLLRTNKQSGKPTREGGMQISKKIDNTTSMYLINQSPTGLFETKIDLQTI

SEQ ID NO: 3040 - protein, 1359 aa, unidentified
  REGION 1..1359: note = Category: MG91 effectors
  REGION 1..1359: note = Description: MG91-232 effector
  source 1..1359: note = uncultivated organism sequence
MLEKPYYLGLDMGTNSVGWAVTDQQYNLLKAKGKDLWGIREFAEADTSVERRTHRISRRRRQREQARIGLLNDYFHDAIIAIDPSFFQRLENSKYHLEDKDQNVRYKYNIFNDPDYTDADYYTQYPTIYHLRKELLENPKPHDVRLVYLALLNMFKHRGHFLNSGISDGNNERSLKDAYINFAISVSELTEDYFNQDVDYSTIEGILSSRDLNRTKKAEELSTVLGIDFKNKKYKEYLRAICGLKINAYTLFSDQLPDDTTKIDLCVSDASFDEKSEELVSLIGEDLFQIILNIKEIYDIGSLAGILKGYTYLSQARVAAYDKHKHDLKLLKSSIKKYCTKEEYNNFFNSDADGSYASYIGSFNSGNKERRVGSKRTSEDLYKEIKKLLKGANKSDPAINEIFTSIETESFLPKQLTASNGIIPNQVHSKEMARILTNAENYLPFLKETDENNLSISNRILQLYKFQIPYYIGPVTEKSQRDGGNGWVIRKDNGRVFPWNIEEKIDVKATSEAFISRMVRRCTYMNGKQVLPKASLEYESFRVLNEINNLRIDGERIPVTLKQDIYTDLFQKGKKVTKKQLCNYLATRGLIESSEQVTGIDIAINNSLSTYGKFKAIFGEDIKLDHIQHMIEDIVFWCTVYGDSKQFLKEQIEDKYKGKLSPEQMKRILGFKFKDWGNLSKEFFELKGADKSTGEAVSIIRALWENNLNLMELINSSEFDFKEQLADYEANSLKTLSDFEPEDLNDYYFSAPVRRMIWQTTLIIKELVHVLGKEPARIFIEMTREKDASRGRTLSRKKKFEDLYKNVKDENTDWAKVIEHADESGTIRSKKMYLYLTQKGRCMYTGNHIELSDLFNDNLYDIDHIYPRHFVKDDNIDNNLVLVTKEKNAHKSDNYPLEAEIFNKQRNMWTQLRKEGFISEEKYNRLMGRNAFTDEQKAGFIARQLVETSQGTKGVAELFHQLLPNSKIVYAKAGNVSDFRRNRELPKSRLVNDFHHAHDAYLNIVVGNVYYVKFTQNPINYIKNSYNKDMNKNNYNLSRMFDWDVKRGDEVAWIAQKQDGAAGTISTVKKMLSKNTPLMTRLSYEGKGALANETLYSAEKAKGEGYIPFKSSDTKIQDVTKYGGFTSVTGAYFFLVEHDEKKKRIRTIESVPLYLADKIDKDSSELERYCDKLGLVNYDVRVRKIKIGSLLNRNGYFAYLTGKTGKQLILRNATNLCLDKKWTRYIKKIEKYKETNVLDSIITSETMVNLYNELLNKFTVGIYGRRPNPIGEKMDSAKNTFTSYTLDNQCNLIYQILQLSKILGFETDLSLLRTNKQSGKPTREGGMQISKKIDNTTSMYLINQSPTGLFETKIDLQTI

SEQ ID NO: 3041 - protein, 1352 aa, unidentified
  REGION 1..1352: note = Category: MG91 effectors
  REGION 1..1352: note = Description: MG91-233 effector
  source 1..1352: note = uncultivated organism sequence
MTAFKYYLGLDMGTNSVGWAATDPEYRLLKAKGKDLWGIREFNEASGAVERRTHRISRRRRQREQVRIGILKDYFHDAICEVDPSFFQRLENSKYHEEDKDVEVRYKNNIFNDSNYTDKDYFNEYPTIYHLRNELISSTEKHDVRLVFLALLNMFKHRGHFLNAGLGENNGESNIDNVYFELTELLSELTEYHLSQDIDCKQIEAILSRRDMSRTHKAEELAGVLHVDLKNKPYKELIRGLCGLKFNACVVFPDVQSEEVTKLDICLSESTFDEKSDEIANIIGEDYFEIIMAMKEMFDIGSLASIMKGHNYLSQARVASYTKHKEDLKLLKEVIKKYCGKKEYDKFFNSDADGSYASYVGSYNSKNKERRVGNKRTSEELYKEIKKLLKDAQKEDENVQKILTSIENETFLPKQLTASNGVIPNQVHAREMKKILSNAENYLPFLTEKDETGLSVSERILKLFTFQIPYYVGPTSENSGKNGGNGWVVRREDGQVLPWNIDEKIDMKATSEAFISRMVRRCTYISGEQVLPKASLEYQSYCVLNEINNIKIDGERISVELKQDIYKAVFQKGKKVTKKQLCKYLHTRGIIETEEQVTGVDVSINNALTTYGKFKPIFGEDISKDSVQKMIEDIVFWCTVYGDSKKFLKDRIEEKYGNKLSEEQIKRILGFKFKDWGNLSKKFLELNGADTSTGESISIIRALWNNNLNLMELINSSLYNYKECLAEYQNTMLKTLSEIEAEDLNEYYFSAPVRRIIWQTILVIKELVKVLGCEPERIFVEMTRKPDEHKTRTSSRRNKFEELYKKVKDEATDWMQVIAKAEEDGKIRSKKMYLYLTQKGRCMYTGKHIELDDLFDKNLYDIDHIYPRHFVKDDNIDNNLVLVCKEKNAHKSDHYPIEEEIFLSQKKMWLELRKSGFITEEKYNRLMGRSPFSDEQKAGFIARQLVETSQGTKGVANILRQLLPGSKIVYAKASNVSEFRHTRDDIPKSRLVNDFHHAHDAYLNIVVGNVYYVKFTQNPLNFIKKDYDKYKEDYNLSKMFDWDVKRNGEVAWIAQRKDGEAGTITTVKRMLSRNTPLMTRYSFEGKGGLANETLCSAKKAKGEGYIPFKSSDDKMQDVTKYGGFTKVTGAYFFLVEHTEKKKRIRTIESVPVYLAQKIEQNPDELKKYCEEILGLVDADIRLKKIKIGSLIKRNGYFCYITGKTGNRLSVRNAVNLCLKNEWIKYISKLEKVKEKDAVDEIITKEKNEVLYSELIQKFKHGIFSKRPNPVEDKLEKGSEKFSNLSIKEQCAVLCQILQLAAVLGSECDMTLLGESAHCGKMLISKKIGDEEIYLLNQSVTGLYEKKINLHTV

SEQ ID NO: 3042 - protein, 1359 aa, unidentified
  REGION 1..1359: note = Category: MG91 effectors
  REGION 1..1359: note = Description: MG91-234 effector
  source 1..1359: note = uncultivated organism sequence
MLEKPYYLGLDMGTNSVGWAVTDQQYNLLKAKGKDLWGIREFAEADTSVERRTHRISRRRRQREQARIGLLNDYFHDAIIAIDPSFFQRLENSKYHLEDKDQNVRYKYNIFNDPDYTDADYYTQYPTIYHLRKELLENPKPHDVRLVYLALLNMFKHRGHFLNSGISDGNNERSLKDAYINFAISVSELTEDYFNQDVDYSTIEGILSSRDLNRTKKAEELSTVLGIDFKNKKYKEYLRAICGLKINAYTLFSDQLPDDTTKIDLCVSDASFDEKSEELVSLIGEDLFQIILNIKEIYDIGSLAGILKGYTYLSQARVAAYDKHKHDLKLLKSSIKKYCTKEEYNNFFNSDADGSYASYIGSFNSGNKERRVGSKRTSEDLYKEIKKLLKGANKSDPAINEIFTSIETESFLPKQLTASNGIIPNQVHSKEMARILTNAENYLPFLKETDENNLSISNRILQLYKFQIPYYIGPVTEKSQRDGGNGWVIRKDNGRVFPWNIEEKIDVKATSEAFISRMVRRCTYMNGKQVLPKASLEYESFRVLNEINNLRIDGERIPVTLKQDIYTDLFQKGKKVTKKQLCNYLATRGLIESSEQVTGIDIAINNSLSTYGKFKAIFGEDIKLDHIQHMIEDIVFWCTVYGDSKQFLKEQIEDKYKGKLSPEQMKRILGFKFKDWGNLSKEFFELKGADKSTGEAVSIIRALWENNLNLMELINSPEFDFKEQLADYEANSLKTLSDFEPEDLNDYYFSAPVRRMIWQTTLIIKELVHVLGKEPARIFIEMTREKDASRGRTLSRKKKFEDLYKNVKDENTDWAKVIEHADESGTIRSKKMYLYLTQKGRCMYTGNHIELSDLFNDNLYDIDHIYPRHFVKDDNIDNNLVLVTKEKNAHKSDNYPLEAEIFNKQRNMWTQLRKEGFISEEKYNRLMGRNAFTDEQKAGFIARQLVETSQGTKGVAELFHQLLPNSKIVYAKAGNVSDFRRNRELPKSRLVNDFHHAHDAYLNIVVGNVYYVKFTQNPINYIKNSYNKDMNKNNYNLSRMFDWDVKREDEVAWIAQKQDGATGTISTVKKMLSKNTPLMTRLSYEGKGALANETLYSAEKAKGEGYIPFKSSDTKIQDVTKYGGFTSVTGAYFFLVEHDEKKKRIRTIESVPLYLADKIDKDSSELERYCDKLGLVNYDIRVRKIKIGSLLNRNGYFAYLTGKTGKQLILRNATNLCLDKKWTRYIKKIEKYKETNVLDSIITSETMVNLYNELLNKFTVGIYGRRPNPIGEKMDSAKNTFTSYTLDNQCNLIYQILQLSKILGFETDLSLLRTNKQSGKPTREGGMQISKKIDNTTSMYLINQSPTGLFETKIDLQTI

SEQ ID NO: 3043 - protein, 1352 aa, unidentified
  REGION 1..1352: note = Category: MG91 effectors
  REGION 1..1352: note = Description: MG91-235 effector
  source 1..1352: note = uncultivated organism sequence
MTAFKYYLGLDMGTNSVGWAATDPEYRLLKAKGKDLWGIREFNEASGAVERRTHRISRRRRQREQVRIGILKDYFHDAICEVDPSFFRRLENSKYHEEDKDVEVRYKNNIFNDGNYTDKDYFNEYPTIYHLRNELISSTEKHDVRLVFLALLNMFKHRGHFLNAGLGENNGESNIDNAYFELTELLSELTEYHLSQDIDCKQIEAILSRRDMSRTHKAEELAGVLHVDLKNKPYKELIRGLCGLKFNACVVFPDVQSEEVTKLDICLSESSFDEKSDEIANIIGEDYFEIIMAMKEMFDIGSLASIMKGHNYLSQARVASYTKHKEDLKLLKEVIKKYCGKKEYDKFFNSDADGSYASYVGSYNSKNKERRVGNKRTSEELYKEIKKLLKDAPKEDENVQKILTSIENETFLPKQLTASNGVIPNQVHAREMKKILSNAENYLPFLTEKDETGLSVSERILKLFTFQIPYYVGPTSENSGKNGGNGWVVRREDGQVLPWNIDEKIDMKATSEAFISRMVRRCTYISGEQVLPKASLEYQSYCVLNEINNIKIDGERISVELKQDIYKAVFQKGKKVTKKQLCKYLHTRGIIETEEQVTGVDVSINNALTTYGKFKPIFGEDISKDSVQKMIEDIVFWCTVYGDSKKFLKDRIEEKYGNKLSEEQIKRILGFKFKDWGNLSKKFLELNGADTSTGESISIIRALWNNNLNLMELINSSLYNYKECLAEYQNTMLKTLSEIEAEDLNEYYFSAPVRRIIWQTILVIKELVKVLGCEPERIFVEMTRKPDEHKTRTSSRRNKFEELYKKVKDEATDWMQVIAKAEEDGKIRSKKMYLYLTQKGRCMYTGKHIELDDLFDKNLYDIDHIYPRHFVKDDNIDNNLVLVCKEKNAHKSDHYPIEEEIFLSQKKMWLELRKSGFITEEKYNRLMGRSPFSDEQKAGFIARQLVETSQGTKGVANILRQLLPGSKIVYAKASNVSEFRHTRDDIPKSRLVNDFHHAHDAYLNIVVGNVYYVKFTQNPLNFIKKDYDKYKEDYNLSKMFDWDVKRNGEVAWIAQRKDGEAGTITTVKKMLSRNTPLMTRYSFEGKGGLANETLYSAKKAKGEGYIPFKSSDDKMQDVTKYGGFTKVTGAYFFLVEHTEKKKRIRTIESVPVYFVQKIEKNPGELKKYCEEILGLVDADIRLKKIKIGSLIKRNGYFCYITGKTGNRLSVRNAVNLCLKNEWIKYISKLEKVKEKDTIDEIITKEKNEVLYSELIQKFKHCIFSKRPNPVGDKLEKGSEKFSNLSIKDQCAVLCQVLRMAAILGSECDMTLLGESSICGEMKISKKIGDEEIYLINQSVTGLYEKKINLHTV

SEQ ID NO: 3044 - protein, 1358 aa, unidentified
  REGION 1..1358: note = Category: MG91 effectors
  REGION 1..1358: note = Description: MG91-236 effector
  source 1..1358: note = uncultivated organism sequence
MEKEYYLGLDMGTNSVGWAVTDDAYNLIRFKGKDMWGIREFDEANPAVERRTHRTSRRREQRNAVRMGLIRSYFADEIQKVDSNFYQRLDNSFFHVEDKQDNVKDKNGIFNDKNYKDADYYKQYPTIFHLRKELIEDASQKDVRLVYLAVANMFKHRGHFLLSGIGSESSKQTITDLYNQVSGLITEEYGISLKTDIAGTDFEQVLCSREYSRTRKSEKVCEILEIKNSDKLKKAFVKSMCGLSVKITDVIDDTFTEISDEDKKITFSFVDSDYDEKAGVLEEKLGTDVYDIISKLKEIHDKAQVAEIMKNYQYLSFARVADYEKHKKDLKILKRVVKKYFEPTVYDKLFRSGENGTYSAYVNSFNSGEKSRRNYKERKQEDLYNSIKKLIKSIDNVCDTDIEYIKNEIEKENFLPKQLTFKNGVIPNQIHASELKAILKNAEKYLPFLNEKDESGYTVSERILMLFSFQIPYYVGPVSSNSNGWVKRLEPGQVLPWNIDKKIDLKETSEQFIQRMVRNCTYIAGEKVLPKASLLYENFKVLNEINNLSINGERIAVALKQDLYNTLFLKGKRVTRKQIFNYFHSRGLVEEDSQISGIDIAVNNSLSTYGKFLPLFGEHLKEDKYKKMVDDIVFWCTVYGDSRKFLREQLEEKYSDVIDENQIKRITGMKFKDWGNLSKEFLELSGCCKSTGEMIPLIRAMWETNYNLMELLHSEEFTYSEELEEKQGKIEKVLSEYTIDDLNEEYFSAPVKRMVWQTLLIIKEIEKIMKCPPTRIFVEMTRKDDEKGDNGRKSSRKDQLLALYKKIQSEDKEWKKEMSSRIEDYDKNGALRSKKLYLYFIQKGLDMYTGKPIDLDNLMSANSNYDIDHIYPRHFVKDDNINNNLVLASKPANAEKSDIYPIKDSIYQKMKYTWKVLRDEGLITEEKYKRLTGRNPFTDEQKAGFIARQLVETGQGTKGVADLLTALLPDTKLVYSKAGNVSDFRKRYDIPKSRLINDFHHAHDAYLNIVVGNIYFTKFTSNPLNYIRKECSSKDNKYQYNLGNMYKWDVKRDGKTAWIAAKEGETGTIATVKKILSRNTPTLTRLTIEGHGGIADATLYSHKKAKQDAYIPLKSSDARMADVTKYGGYSSVTTAYLFLVEHEIKGKKIRTLETVPLYLKDRLENSKEKLEEYCRESLGYTNPSVRMKKIKLQSLIKLNGYYMQISGKSIKQFEVRNYVQICLNGKWVDYIHKLEKYQDKGVIDNAITDEKNVELYNILCEKHSVGIFTLRPNPVGDKIKKGYDKFVNLTTEEQIKLLIEIIKLTCVGIVKADLRLIGASEKSGTMKINKNITDAKECFLINQSVTGLYENRIDLLRV

SEQ ID NO: 3045 - protein, 1353 aa, unidentified
  REGION 1..1353: note = Category: MG91 effectors
  REGION 1..1353: note = Description: MG91-237 effector
  source 1..1353: note = uncultivated organism sequence
MAVFKYYLGLDMGTNSVGWAVTDIQYNILKVKGKDLWGIREFNEASTAVERRTHRVSRRARQRKTVLIGLLKYYFHDEICKKDPYFFQRLDNSKYHLEDKDDEVKYTYNIFNDINYTDADYFKQYPTIFHLRNELIFNPNEHDIRLVYLALLNMFKHRGHFLNDSLIDDDSEMKIDEAYLELANLLSEYTEYYLKTDVNITELENILSDRDESRTKKSEKIVELLEIDSKNKPYKEMIRGLCGLKFNAITIFSDVQLEDGQKLDICLSDASFEEKADEIASILGEDYFQIILSMKRLYDIGSLSEIMKGYSYLSEARVASYKKHKEDLCCLKRVIKKYCNKECYEKIFNSDEDGSYASYVGSFNSNSKQRRVGNKRSIEDLYKEIKKILKAVPQEDADVQRILTSIDNETFLPKQLTASNGVIPNQIHEKEMKKILSNAENYLPFLKEKDEKNQTVSERILMLFTFRIPYYVGPTTENSQKNGGNGWVIRKEAGQVLPWNIEEKIDMKATSEAFISRMIRRCTYISGKPVLPRASLEYQSFCVLNAINNITIDGYRISVELKQDIYNDLFLKGKKVTKKQLCKYLYLRGLITSENQVSGIDIEINNTLSTYKIFKNIFGDDIIYDSTKIMIEDIVFWCTVYGESKKFLRERLCEKYGDKLSQDQIKRILGLKFKDWGNLSKEFLELSGVNKKTNESMSIIKALWENNLNMMELINSDLFDFKEKIVEYQTDLMKTIYNIEVDDLENYYFSAPVKRMVWQTILVVKELVGVLGCEPTRIFIEMTRRHDEITKRTINRKKKFEALYKSVKDEDTDWMNVIADADDTGRIRSKKMYLYLTQKGRCMYTGKHIELSDLFNNNLYDIDHIYPRHFVKDDNIDNNLVLVCKEKNAHKRDIYPLEEQIYSSQKEMWSELKKLGFINEEKYNRLTGRNSFTDEQKAGFIARQLVETSQGTKGVANILQQLLPESKIVYAKASNVSEFRQSRDIPKSRLVNEFHHAHDAYLNIVVGNVYYVKFTQDPLKFIKNDYDKDKINNNYNLSKMFDWDVKRKGEVAWIAQKKNGDVGTIATVKKVLSKNTPLMTRYCFEGRGKISKEERHSAKEAKQVGYLPYKTSDLKIKDVTKYGGFTSITVAYYFVVEHDEKKKRIRTIESVPLYLAAKINSNHEELDKYCKNELGLVNFNIRVRKIRIGSLLKRNGYFFYITGKTGNRLIVRNAVNICFRKEWIKYSSKIEKYQEKKIIDDIITKDKNELFYDEFIKKYENSIFANRPNSILEKLKKAFPVFKESNIEQQCSILYQLLNLSKILGSECDLRLIGESPNCGKMLINKKIGDDDIYLINQSVTGVYENKINLRTV

SEQ ID NO: 3046 - protein, 1352 aa, unidentified
  REGION 1..1352: note = Category: MG91 effectors
  REGION 1..1352: note = Description: MG91-238 effector
  source 1..1352: note = uncultivated organism sequence
MQEKPYYLGLDMGTNSVGWAVTDQHYNLLKAKGKDLWGIREFIEADTSVERRTHRISRRRRQREQARIGLLNDYFHDAIIAIDPSFFQRLENSKYHLEDKDQNVRYKYNIFNDPDYTDADYYTQYPTIYHLRKELLENPKPHDVRLVYLALLNMFKHRGHFLNSGISDGNNERSLKDAYINFAISVSELTEDYFNQDVDYSTIEGILSSRDLNRTKKAEELSTVLGIDFKNKKYKEYLRAICGLKINAYTLFSDQLPDDTTKIDLCVSDASFDEKSEELVSLIGEDLFQIILNIKEIYDIGSLAGILKGYTYLSQARVAAYDKHKHDLKLLKSSIKKYCTKEEYNNFFNSDADGSYASYIGSFNSGNKERRVGSKRTSEDLYKEIKKLLKGANKSDPAINEIFTSIETESFLPKQLTASNGIIPNQVHSKEMARILTNAENYLPFLKETDENNLSISNRILQLYKFQIPYYIGPVTEKSQRDGGNGWVIRKDNGRVFPWNIEEKIDVKATSEAFISRMVRRCTYMNGKQVLPKASLEYESFRVLNEINNLRIDGERIPVTLKQDIYTDLFQKGKKVTKKQLCNYLATRGLIESSEQVTGIDIAINNSLSTYGKFKAIFGEDIKLDHIQHMIEDIVFWCTVYGDSKQFLKEQIEDKYKGKLSPEQMKRILGFKFKDWGNLSKEFFELKGADKSTGEAVSIIRALWENNLNLMELINSSEFDFKEQLADYEANSLKTLSDFEPEDLNDYYFSAPVRRMIWQTTLIIKELVHVLGKEPARIFIEMTREKDASRGRTLSRKKKFEDLYKNVKDENTDWAKVIEHADESGTIRSKKMYLYLTQKGRCMYTGNHIELSDLFNDNLYDIDHIYPRHFVKDDNIDNNLVLVTKEKNAHKSDNYPLEAEIFNKQRNMWTQLRKEGFISEEKYNRLMGKNAFTDEQKAGFIARQLVETSQGTKGVAELFHQLLPNSKIVYAKAGNVSDFRRNRELPKSRLVNDFHHAHDAYLNIVVGNVYYVKFTQNPINYIKNSYNTDMNKNNYNLSRMFDWDVKRGDEVAWIAQKQDGAAGTISTVKKMLSKNTPLMTRLSYEGKGALANETLYSAEKAKGEGYIPFKSSDTKIQDVTKYGGFTSVTGAYFFLVEHDEKKKRIRTIESVPLYLADKIDKDSSELERYCDKLGLVNYDVRVRKIKIGSLIKYNGYFCYITGKTGYRLIVRNATNLCLTSNWRKYIKKIEKYKETTIIDNVITAEENIKLYNELLNKFTVGIFGRRPNPIGEKMDSARDKFASLSIENQCLALYQILQLTAILGNESDLQLIGASTHAGKMLISKKIGTDEIYLINQSPTGLFETKIDLQTI

SEQ ID NO: 3047 - protein, 1358 aa, unidentified
  REGION 1..1358: note = Category: MG91 effectors
  REGION 1..1358: note = Description: MG91-239 effector
  source 1..1358: note = uncultivated organism sequence
MEKEYYLGLDMGTNSVGWAVTDDAYNLIRFKGKDMWGIREFDEANPAVERRTHRTSRRREQRNAVRMGLIRSYFADEIQKVDSNFYQRLDNSFFHVEDKQDNVKDKNGIFNDKNYKDADYYKQYPTIFHLRKELIEDASQKDVRLVYLAVANMFKHRGHFLLSGIGSESSKQTITDLYNQVSGLITEEYGISLKTDIAGTDFEQVLCSREYSRTRKSEKVCEILEIKNSDKLKKAFVKSMCGLSVKITDIIDDTFTEISDEDKKITFSFVDSDYDEKAGVLEEKLGTDVYDIISKLKEIHDKAQVAEIMKNYQYLSFARVADYEKHKKDLKILKRIVKKYFEPTIYDKLFRSEENGTYSAYVNSFNSEEKSRRNYKVRKQEDLYNSIKKLLKSVDNVYDTDIEYIKNEMDKENFLPKQLTFKNGVIPNQIHASELKAILKNAEKYLPFLNEKDESGYTVSERILMLFSFQIPYYVGPVSPNSNGWVKRLEPGQVLPWNIDKKIDLKETSEQFIQRMVRNCTYIAGEKVLPKASLLYENFKVLNEINNLSISGERIAVALKQDLYNTLFLKGKRVTRKQIFNYFHSRGLVEEDSQISGIDIAVNNSLSTYGKFLPLFGDHLKEDKYKKMVDDIVFWCTVYGDSRKFLREQLEEKYSDVLDENQIKRITGMKFKDWGNLSKEFLELSGCCKSTGEVMPLIRAMWETNYNLMELLHSEEFTYSEELEEKQGKIEKVLSEYTIDDLNEEYFSAPVKRMVWQTLLIIKEIEKIMKCPPTRIFVEMTRKDDEKGDNGRKSSRKDQLLALYKKIQSEDKEWKKEMSSRIEDYDKNGALRSKKLYLYFIQKGLDMYTGKPIDLDNLMSANSNYDIDHIYPRHFVKDDNINNNLVLASKPANAEKSDIYPIKDSIYQKMKYTWKVLRDEGLITEEKYKRLTGRNPFTDEQKAGFIARQLVETGQGTKGVADLLTALLPDTKLVYSKAGNVSDFRKKYDIPKSRLINDFHHAHDAYLNIVVGNIYFTKFTSNPLNYIRKECSSKDNKYQYNLGNMYKWDVKRDGKTAWIAAKEGETGTIATVKKMLSRNTPTLTRLTIEGHGGIADATLYSHKKAKQDAYIPLKSSDARMADVTKYGGYSSVTTAYLFLVEHEIKGKKIRTLETVPLYLKDRLENSKEKLEEYCGETLGYTNPSVRMKKIKLQSLIKLNGYYMQISGKTNKQFTVRNYVQFCLNSKWVDYIHKLEKYQDKGVIDDAITDEKNVELYNVLCEKHSVGIFTLRPNPVGDKIKKGYDKFVNLTTEEQIKLLIEIIKLTCVGIVSANLTLIGGASISGKMLISKNITDAKECLLINQSVTGLYENRIDLLRV

SEQ ID NO: 3048 - protein, 1358 aa, unidentified
  REGION 1..1358: note = Category: MG91 effectors
  REGION 1..1358: note = Description: MG91-240 effector
  source 1..1358: note = uncultivated organism sequence
MEKEYYLGLDMGTNSVGWAVTDDAYNLIRFKGKDMWGIREFDEANPAVERRTHRTSRRREQRNAVRMGLIRSYFADEIQKVDSNFYQRLDNSFFHVEDKQDNVKDKNGIFNDKNYKDADYYKQYPTIFHLRKELIEDASQKDVRLVYLAVANMFKHRGHFLLSGIGSESSKQTITDLYNQVTGLITEEYGISLKTDIAGTDFEQVLCSREYSRTRKSEKVCEILEIKNSDKLKKAFVKSMCGLSVKITDIIDDTFTEISDEDKKITFSFVDSDYDEKAGVLEEKLGTDVYDIISKLKEIHDKAQVAEIMKNYQYLSFARVADYEKHKKDLKILKRVVKKYFEPTVYDKLFRSEENGTYSAYVNSFNSGEKSRRNYKERKQEDLYNSIKKLLKSIDNVCDTDIEYIKNEMDKENFLPKQLTFKNGVIPNQIHASELKAILKNAEKYLPFLNEKDESGYTVSERILMLFSFQIPYYVGPVSSNSNGWVKRLEPGQVLPWNIDKKIDLKETSEQFIQRMVRNCTYIAGEKVLPKASLLYENFKVLNEINNLSINGERITVNLKQDLYNTLFLKGKRVTRKQIFNYFHSRGLVEEDSQISGIDIAVNNSLSTYGKFLPLFGEHLKEDKYKKMVDDIVFWCTVYGDSRKFLREQLEEKYSDVLDENQIKRITGMKFKDWGNLSKEFLELSGCCKSTGEVMPLIRAMWETNYNLMELLHSEEFTYSEELEEKQGKIEKVLSEYTIDDLNEEYFSAPVKRMIWQTLLIIKEIEKIMKCPPTRIFVEMTRKDDEKGDNGRKSSRKDQLLALYKKIQSEDKEWKKEMSSRIEDYDKNGALRSKKLYLYFIQKGLDMYTGKPIDLDNLMSANSNYDIDHIYPRHFVKDDNINNNLVLASKPANAEKSDIYPIKDSIYQKMKYTWKVLRDEGLITEEKYKRLTGRNPFTDEQKAGFIARQLVETGQGTKGVADLLTALLPDTKLVYSKAGNVSDFRKRYDIPKSRLINDFHHAHDAYLNIVVGNIYFTKFTSNPLNYIRKECSSKDNKYQYNLGNMYKWDVKRDGKTAWVAPEEGETGTLATVKKMLSRNTPILTRLTIEGHGGIADATLYSHKKAKQDTYIPLKSSDARMADVTKYGGYSSVTTAYLFLVEHEIKGKKIRTLETVPLYLKDRLENSKEKLEEYCRETLGYTNPSVRMKKIKLQSLIKLNGYYMQISGKTNKQFTVRNYVQFCLNSKWVDYIHKLEKYQDKGVIDDAITDEKNVELYNVLCEKHSVGIFTLRPNPVGDKIKKGYDKFVNLTTEEQIKLLIEIIKLTCVGIVSANLTLIGGASISGKMLISKNITDAKECLLINQSVTGLYENRIDLLRV

SEQ ID NO: 3049 - protein, 1352 aa, unidentified
  REGION 1..1352: note = Category: MG91 effectors
  REGION 1..1352: note = Description: MG91-241 effector
  source 1..1352: note = uncultivated organism sequence
MLEKPYYLGLDMGTNSVGWAVTDQQYNLLKAKGKDLWGIREFAEADTSVERRTHRISRRRRQREQARIGLLNDYFHDAIIAIDPSFFQRLENSKYHLEDKDQNVRYKYNIFNDPDYTDADYYTQYPTIYHLRKELLENPKPHDVRLVYLALLNMFKHRGHFLNSGISDGNNERSLKDAYINFAISVSELTEDYFNQDVDYSTIEGILSSRDLNRTKKAEELSTVLGIDFKNKKYKEYLRAICGLKINAYTLFSDQLPDDTTKIDLCVSDASFDEKSEELVSLIGEDLFQIILNIKEIYDIGSLAGILKGYTYLSQARVAAYDKHKHDLKLLKSSIKKYCTKEEYNNFFNSDADGSYASYIGSFNSGNKERRVGSKRTSEDLYKEIKKLLKGANKSDPAINEIFTSIETESFLPKQLTASNGIIPNQVHSKEMARILTNAENYLPFLKETDENNLSISNRILQLYKFQIPYYIGPVTEKSQRDGGNGWVIRKDNGRVFPWNIEEKIDVKATSEAFISRMVRRCTYMNGKQVLPKASLEYESFRVLNEINNLRIDGERIPVTLKQDIYTDLFQKGKKVTKKQLCNYLATRGLIESSEQVTGIDIAINNSLSTYGKFKAIFGEDIKLDHIQHMIEDIVFWCTVYGDSKQFLKEQIEDKYKGKLSPEQMKRILGFKFKDWGNLSKEFFELKGADKSTGEAVSIIRALWENNLNLMELINSPEFDFKEQLADYEANSLKTLSDFEPEDLNDYYFSAPVRRMIWQTTLIIKELVHVLGKEPARIFIEMTREKDASRGRTLSRKKKFEDLYKNVKDENTDWAKVIEHADESGTIRSKKMYLYLTQKGRCMYTGNHIELSDLFNDNLYDIDHIYPRHFVKDDNIDNNLVLVTKEKNAHKSDNYPLEAEIFNKQRNMWTQLRKEGFISEEKYNRLMGRNAFTDEQKAGFIARQLVETSQGTKGVAELFHQLLPNSKIVYAKAGNVSDFRRNRELPKSRLVNDFHHAHDAYLNIVVGNVYYVKFTQNPINYIKNSYNKDMNKNNYNLSRMFDWDVKRGDEVAWIAQKQDGATGTISTVKKMLSKNTPLMTRLSYEGKGALANETLYSAEKAKGEGYIPFKSSDTKIQDVTKYGGFTSVTGAYFFLVEHDEKKKRIRTIESVPLYLADKIDKDSSELERYCDKLGLVNYDVRVRKIKIGSLIKYNGYFCYITGKTGYRLIVRNATNLCLASNWRKYIKKIEKYKETTIIDNVITAEENIKLYNELLNKFTVGIFGRRPNPIGEKMDSARDKFASLSIENQCLALYQILQLTAILGNESDLQLIGASTHAGKMLISKKIGTDEIYLINQSPTGLFETKIDLQTI

SEQ ID NO: 3050 - protein, 1352 aa, unidentified
  REGION 1..1352: note = Category: MG91 effectors
  REGION 1..1352: note = Description: MG91-242 effector
  source 1..1352: note = uncultivated organism sequence
MTAFKYYLGLDMGTNSVGWAATDPEYRLLKAKGKDLWGIREFNEASGAVERRTHRISRRRRQREQVRIGILKDYFHDAICEVDPGFFQRLENSKYHEEDKDVEVRYKNNIFNDSNYTDKDYFNEYPTIYHLRNELISSTEKHDVRLVFLALLNMFKHRGHFLNAGLGENNGESNIDNAYFELTELLSELTEYHLSQDIDCKQIEAILSRRDMSRTHKAEELAGVLHVDLKNKPYKELIRGLCGLKFNACVVFPDVQSEEVTKLDICLSESTFDEKSDEIANIIGEDYFEIIMAMKEMFDIGSLASIMKGHNYLSQARVASYTKHKEDLKLLKEVIKKYCGKKEYDKFFNSDADGSYASYVGSYNSKNKERRVGNKRTSEELYKEIKKLLKDAQKEDENVQKILTSIENETFLPKQLTASNGVIPNQVHAREMKKILSNAENYLPFLTEKDETGLSVSERILKLFTFQIPYYVGPTSENSGKNGGNGWVVRREDGQVLPWNIDEKIDMKATSEAFISRMVRRCTYISGEQVLPKASLEYQSYCVLNEINNIKIDGERISVELKQDIYKAVFQKGKKVTKKQLCKYLHTRGIIETEEQVTGVDVSINNALTTYGKFKPIFGEDISKDSVQKMIEDIVFWCTVYGDSKKFLKDRIEEKYGNKLSEEQIKRILGFKFKDWGNLSKKFLELNGADTSTGESISIIRALWNNNLNLMELINSSLYNYKECLAEYQNTMLKTLSEIEAEDLNEYYFSAPVRRMIWQTIHVIKELVKVLGCEPERIFVEMTRKPDEHKTRTSSRRNKFEELYKKVKDETTDWMQVIANAEEDGKIRSKKMYLYLTQKGRCMYTGKHIELDDLFDNNLYDIDHIYPRHFVKDDNIDNNLVLVCKEKNAHKSDHYPIEEEIFLSQKKMWLELRKSGFITEEKYNRLMDRNPFSDEQKAGFIARQLVETSQGTKGVANILRQLLPGSKIVYAKASNVSEFRCTRDDIQKSRLVNDFHHAHDAYLNIVVGNVYYVKFTQNPLNFIKKDYDKYKEDYNLSKMFDWDVKRNGEVAWIAQRKDGAAGTITTVKRMLSRNTPLMTRYSFDGKGGLTNETLYSAKKAKGEGYIPFKSSDDKMQDVTKYGGFTSVTGAYFFLVEHTEKKKRIRTIESVPVYLAQKIEQNPDELKKYCEEILGLIDADIRLKKIKIGSLIKRNGYFCYITGKTVNRLIVRNAVNLCLKNEWIKYISKLEKVKEKDAVDKIITKEKNEVLYSELIQKFKHGIFSKRPNPVGDKLEKDSEKFNNLSIKDQCAVLCQVLRMAAILGSECDMTLLGDSPNCGKMLISKKIGDEEIYLINQSVTGLYEKKINLHTV

SEQ ID NO: 3051 - protein, 1358 aa, unidentified
  REGION 1..1358: note = Category: MG91 effectors
  REGION 1..1358: note = Description: MG91-243 effector
  source 1..1358: note = uncultivated organism sequence
MEKEYYLGLDMGTNSVGWAVTDDAYNLIRFKGKDMWGIREFDEANPAVERRTHRTSRRREQRNAVRMGLIRSYFADEIQKVDSNFYQRLDNSFFHVEDKQDNVKDKNGIFNDKNYKDADYYKQYPTIFHLRKELIEDASQKDVRLVYLAVANMFKHRGHFLLSGIGSESSKQTITDLYNQVSGLITEEYGISLKTDIAGTDFEQVLCSREYSRTRKSEKVCEILEIKNSDKLKKAFVKSMCGLSVKITDVIDDTFTEISDEDKKITFSFVDSDYDEKAGVLEEKLGTDVYDIISKLKEIHDKAQVAEIMKNYQYLSFARVADYEKHKKDLKILKRVVKKYFEPTVYDKLFRSGENGTYSAYVNSFNSGEKSRRNYKERKQEDLYNSIKKLLKSIDNVCDTDIEYIKNEIEKENFLPKQLTFKNGVIPNQIHASELKAILKNAEKYLPFLNEKDESGYTVSERILMLFSFQIPYYVGPVSPNSNGWVKRLEPGQVLPWNIDKKIDLKETSEQFIQRMVRNCTYIAGEKVLPKASLLYENFKVLNEINNLSINGERIAVALKQDLYNTLFLKGKRVTRKQIFNYFHSRGLVEEDSQISGIDIAVNNSLSTYGKFLPLFGEHLKEDKYKKMVDDIVFWCTVYGDSRKFLREQLEEKYSDVLDENQIKRITGMKFKDWGNLSKEFLELLGCCKSTGEMIPLIRAMWETNYNLMELLHSEEFTYSEELEEKQGKIEKVLSEYTIDDLNEEYFSAPVKRMVWQTLLIIKEIEKIMKCPPTRIFVEMTRKDDEKGDNGRKSSRKDQLLALYKKIQSEDKEWKKEMSSRIEDYDKNGALRSKKLYLYFIQKGLDMYTGKPIDLDNLMSANSNYDIDHIYPRHFVKDDNINNNLVLASKPANAEKSDIYPIKDSIYQKMKYTWKVLRDEGLITEEKYKRLTGRNPFTDEQKAGFIARQLVETGQGTKGVADLLTALLPDTKLVYSKAGNVSDFRKRYDIPKSRLINDFHHAHDAYLNIVVGNIYFTKFTSNPLNYIRKECSSKDNKYQYNLGNMYKWDVKRDGKTAWIAAKEGETGTIATVKKILSRNTPTLTRLTIEGHGGIADATLYSHKKAKQDAYIPLKSSDARMADVTKYGGYSSVTTAYLFLVEHEIKGKKIRTLETVPLYLKDRLENSKEKLEEYCRETLGYTNPSVRMKKIKLQSLIKLNGYYMQISGKTNKQFTVRNYVQFCLNSKWVDYIHKLEKYQDKGVIDDAITDEKNVELYNVLCEKHSVGIFTLRPNPVGDKIKKGYDKFVNLTTEEQIKLLIEIIKLTCVGIVSANLTLIGGAAISGKMLISKNITDAKECLLINQSVTGLYENRIDLLRV

SEQ ID NO: 3052 - protein, 1352 aa, unidentified
  REGION 1..1352: note = Category: MG91 effectors
  REGION 1..1352: note = Description: MG91-244 effector
  source 1..1352: note = uncultivated organism sequence
MTAFKYYLGLDMGTNSVGWAATDPEYRLLKAKGKDLWGIREFNEASGAVERRTHRISRRRRQREQVRIGILKDYFHDAICEVDPSFFQRLENSKYHEEDKDVEVRYKNNIFNDSNYTDKDYFNEYPTIYHLRNELISSTEKHDVRLVFLALLNMFKHRGHFLNAGLGENNGESNIDNAYFELTELLSELTEYHLSQDIDCKQIEAILSRRDMSRTHKAEELAGVLHVDLKNKPYKELIRGLCGLKFNACVVFPDVQSEEVTKLDICLSESTFDEKSDEIANIIGEDYFEIIMAMKEMFDIGSLASIMKGHNYLSQARVASYTKHKEDLKLLKEVIKKYCGKKEYDKFFNSDADGSYASYVGSYNSKNKERRVGNKRTSEELYKEIKKLLKDAQKEDENVQKILTSIENETFLPKQLTASNGVIPNQVHAREMKKILSNAENYLPFLTEKDETGLSVSERILKLFTFQIPYYVGPTSENSGKNGGNGWVVRREDGQVLPWNIDEKIDMKATSEAFISRMVRRCTYISGEQVLPKASLEYQSYCVLNEINNIKIDGERISVELKQDIYKAVFQKGKKVTKKQLCKYLHTRGIIETEEQVTGVDVSINNALTTYGKFKPIFGEDISKDSVQKMIEDIVFWCTVYGDSKKFLKDRIEEKYGNKLSEEQIKRILGFKFKDWGNLSKKFLELNGADTSTGESISIIRALWNNNLNLMELINSSLYNYKECLAEYQNTMLKTLSEIEAEDLNEYYFSAPVRRMIWQTILVIKELVKVLGCEPERIFVEMTRKPDEHKTRTSSRRNKFEELYKKVKDETTDWMQVIANAEEDGKIRSKKMYLYLTQKGRCMYTGKHIELDDLFDNNLYDIDHIYPRHFVKDDNIDNNLVLVCKEKNAHKSDHYPIEEEIFLSQKKMWLELRKSGFITEEKYNRLMDRNPFSDEQKAGFIARQLVETSQGTKGVANILRQLLPGSKIVYAKASNVSEFRCTRDDIQKSRLVNDFHHAHDAYLNIVVGNVYYVKFTQNPLNFIKKDYDKYKEDYNLSKMFDWDVKRNGEVAWIAQRKDGAAGTITTVKRMLSRNTPLMTRYSFDGKGGLTNETLYSAKKAKGEGYIPFKSSDDKMQDVTKYGGFTSVTGAYFFLVEHTEKKKRIRTIESVPVYLAQKIEQNPDELKKYCEEILGLIDADIRLKKIKIGSLIKRNGYFCYITGKTVNRLIVRNAVNLCLKNEWIKYISKLEKVKEKDAVDKIITKEKNEVLYSELIQKFKHGIFSKRPNPVGDKLEKDSEKFNNLSIKDQCAVLCQVLRMAAILGSECDMTLLGDSPNCGKMLISKKIGDEEIYLINQSVTGLYEKKINLHTV

SEQ ID NO: 3053 - protein, 1352 aa, unidentified
  REGION 1..1352: note = Category: MG91 effectors
  REGION 1..1352: note = Description: MG91-245 effector
  source 1..1352: note = uncultivated organism sequence
MTAFKYYLGLDMGTNSVGWAATDPEYRLLKAKGKDLWGIREFNEASGAVERRTHRISRRRRQREQVRIGILKDYFHDAICEVDPSFFRRLENSKYHEEDKDVEVRYKNNIFNDGNYTDKDYFNEYPTIYHLRNELISSTEKHDVRLVFLALLNMFKHRGHFLNAGLGENNGESNIDNAYFELTELLSELTEYHLSQDIDCKQIEAILSRRDMSRTHKAEELAGVLHVDLKNKPYKELIRGLCGLKFNACVVFPDVQSEEVTKLDICLSESSFDEKSDEIANIIGEDYFEIIMAMKEMFDIGSLASIMKGHNYLSQARVASYTKHKEDLKLLKEVIKKYCGKKEYDKFFNSDADGSYASYVGSYNSKNKERRVGNKRTSEELYKEIKKLLKDAPKEDENVQKILTSIENETFLPKQLTASNGVIPNQVHAREMKKILSNAENYLPFLTEKDETGLSVSERILKLFTFQIPYYVGPTSENSGKNGGNGWVVRREDGQVLPWNIDEKIDMKATSEAFISRMVRRCTYISGEQVLPKASLEYQSYCVLNEINNIKIDGERISVELKQDIYKAVFQKGKKVTKKQLCKYLHTRGIIETEEQVTGVDVSINNALTTYGKFKPIFGEDISKDSVQKMIEDIVFWCTVYGDSKKFLKDRIEEKYGNKLSEEQIKRILGFKFKDWGNLSKKFLELNGADTSTGESISIIRALWNNNLNLMELINSSLYNYKECLAEYQNTMLKTLSEIEAEDLNEYYFSAPVRRIIWQTILVIKELVKVLGCEPERIFVEMTRKPDEHKTRTSSRRNKFEELYKKVKDEATDWMQVIAKAEEDGKIRSKKMYLYLTQKGRCMYTGKHIELDDLFDKNLYDIDHIYPRHFVKDDNIDNNLVLVCKEKNAHKSDHYPIEEEIFLSQKKMWLELRKSGFITEEKYNRLMGRSPFSDEQKAGFIARQLVETSQGTKGVANILRQLLPGSKIVYAKASNVSEFRHTRDDIPKSRLVNDFHHAHDAYLNIVVGNVYYVKFTQNPLNFIKKDYDKYKEDYNLSKMFDWDVKRNGEVAWIAQRKDGEAGTITTVKRMLSRNTPLMTRYSFEGKGGLANETLCSAKKAKGEGYIPFKSSDDKMQDVTKYGGFTKVTGAYFFLVEHTEKKKRIRTIESVPVYLAQKIEQNPDELKKYCEEILGLVDADIRLKKIKIGSLIKRNGYFCYITGKTGNRLSVRNAVNLCLKNEWIKYISKLEKVKEKDAVDEIITKEKNEVLYSELIQKFKHGIFSKRPNPVEDKLEKGSEKFSNLSIKEQCAVLCQILQLAAVLGSECDMTLLGESAHCGKMLISKKIGDEEIYLLNQSVTGLYEKKINLHTV

SEQ ID NO: 3054 - protein, 1352 aa, unidentified
  REGION 1..1352: note = Category: MG91 effectors
  REGION 1..1352: note = Description: MG91-246 effector
  source 1..1352: note = uncultivated organism sequence
MTAFKYYLGLDMGTNSVGWAATDPGYRLLKAKGKDLWGIREFNEASGAVERRTHRISRRRRQREQVRIGILKDYFHDAICEVDPGFFQRLENSKYHEEDKDVEVRYKNNIFNDSNYTDKDYFNEYPTIYHLRNELISSTEKHDVRLVFLALLNMFKHRGHFLNAGLGENNGESNIDNAYFELTELLSELTEYHLSQDIDCKQIEAILSRRDMSRTHKAEELAGVLHVDLKNKPYKELIRGLCGLKFNACVVFPDVQSEEVTKLDICLSESTFDEKSDEIANIIGEDYFEIIMAMKEMFDIGSLASIMKGHNYLSQARVASYTKHKEDLKLLKEVIKKYCSKKEYDKFFNSDADGSYASYVGSYNSKNKERRVGNKRTSEELYKEIKKLLKDAQKEDENVQKILTSIENETFLPKQLTASNGVIPNQVHAREMKKILSNAENYLPFLTEKDETGLSVSERILKLFTFQIPYYVGPTSENSGKNGGNGWVVRREDGQVLPWNIDEKIDMKATSEAFISRMVRRCTYISGEQVLPKASLEYQSYCVLNEINNIKIDGERISVELKQDIYKAVFQKGKKVTKKQLCKYLHTRGIIETEEQVTGVDVSINNALTTYGKFKPIFGEDISKDSVQKMIEDIVFWCTVYGDSKKFLKDRIEEKYGNKLSEEQIKRILGFKFKDWGNLSKKFLELNGADTSTGESISIIRALWNNNLNLMELINSSLYNYKECLAEYQNTMLKTLSEIEAEDLNEYYFSAPVRRMIWQTILVIKELVKVLGCEPERIFVEMTRRPDEHKTRTSSRRNKFEELYKKVKDETTDWMQVIANAEEDGKIRSKKMYLYLTQKGRCMYTGKHIELDDLFDNNLYDIDHIYPRHFVKDDNIDNNLVLVCKEKNAHKSDHYPIEEEIFLSQKKMWLELRKSGFITEEKYNRLMGRSPFSDEQKAGFIARQLVETSQGTKGVANILRQLLPGSKIVYAKASNVSEFRCTRDDIQKSRLVNDFHHAHDAYLNIVVGNVYYVKFTQNPLNFIKKDYDKYKEDYNLSKMFDWDVKRNGEVAWIAQRKDGAAGTITTVKRMLSRNTPLMTRYSFDGKGGLTNETLYSAKKAKGEGYIPFKSSDDKMQDVTKYGGFTSVTGAYFFLVEHTEKKKRIRTIELVPVYLAQKIEQNPDELKKYCEEILGLIDADIRLKKIKIGSLIKRNGYFCYITGKTGNRLIVRNAVNLCLKNEWIKYISKLEKVKEKDAVDKIITKEKNEVLYSELIQKFKHGIFSKRPNPVGDKLEKDSEKFNNLSIKDQCAVLCQVLRMAAILGSECDMTLLGDSPNCGKMLISKKIGDEEIYLINQSVTGLYEKKINLHTV

SEQ ID NO: 3055 - protein, 1352 aa, unidentified
  REGION 1..1352: note = Category: MG91 effectors
  REGION 1..1352: note = Description: MG91-247 effector
  source 1..1352: note = uncultivated organism sequence
MTAFKYYLGLDMGTNSVGWAATDPEYRLLKAKGKDLWGIREFNEASGAVERRTHRISRRRRQREQVRIGILKDYFHDAICEVDPSFFRRLENSKYHEEDKDVEVRYKNNIFNDGNYTDKDYFNEYPTIYHLRNELISSTEKHDVRLVFLALLNMFKHRGHFLNAGLGENNGESNIDNAYFELTELLSELTEYHLSQDIDCKQIEAILSRRDMSRTHKAEELAGVLHVDLKNKPYKELIRGLCGLKFNACVVFPDVQSEEVTKLDICLSESSFDEKSDEIANIIGEDYFEIIMAMKEMFDIGSLASIMKGHNYLSQARVASYTKHKEDLKLLKEVIKKYCGKKEYDKFFNSDADGSYASYVGSYNSKNKERRVGNKRTSEELYKEIKKLLKDAPKEDENVQKILTSIENETFLPKQLTASNGVIPNQVHAREMKKILSNAENYLPFLTEKDETGLSVSERILKLFTFQIPYYVGPTSENSGKNGGNGWVVRREDGQVLPWNIDEKIDMKATSEAFISRMVRRCTYISGEQVLPKASLEYQSYCVLNEINNIKIDGERISVELKQDIYKAVFQKGKKVTKKQLCKYLHTRGIIETEEQVTGVDVSINNALTTYGKFKPIFGEDISKDSVQKMIEDIVFWCTVYGDSKKFLKDRIEEKYGNKLSEEQIKRILGFKFKDWGNLSKKFLELNGADTSTGESISIIRALWNNNLNLMELINSSLYNYKECLAEYQNTMLKTLSEIEAEDLNDYYFSAPVRRIIWQTILVIKELVKVLGCEPERIFVEMTRKPDEHKTRTSSRRNKFEELYKKVKDEATDWMQVIAKAEEDGKIRSKKMYLYLTQKGRCMYTGKHIELDDLFDKNLYDIDHIYPRHFVKDDNIDNNLVLVCKEKNAHKSDHYPIEEEIFLSQKKMWLELRKSGFITEEKYNRLMGRSPFSDEQKAGFIARQLVETSQGTKGVANILRQLLPGSKIVYAKASNVSEFRHTRDDIPKSRLVNDFHHAHDAYLNIVVGNVYYVKFTQNPLNFIKKDYDKYKEDYNLSKMFDWDVKRNGEVAWIAQRKDGEAGTITTVKRMLSRNTPLMTRYSFEGKGGLANETLCSAKKAKGEGYIPFKSSDDKMQDVTKYGGFTKVTGAYFFLVEHTEKKKRIRTIESVPVYLAQKIEQNPDELKKYCEEILGLVDADIRLKKIKIGSLIKRNGYFCYITGKTGNRLSVRNAVNLCLKNEWIKYISKLEKVKEKDAVDEIITKEKNEVLYSELIQKFKHGIFSKRPNPVEDKLEKGSEKFSNLSIKEQCAVLCQILQLAAVLGSECDMTLLGESAHCGKMLISKKIGDEEIYLLNQSVTGLYEKKINLHTV

SEQ ID NO: 3056 - protein, 1352 aa, unidentified
  REGION 1..1352: note = Category: MG91 effectors
  REGION 1..1352: note = Description: MG91-248 effector
  source 1..1352: note = uncultivated organism sequence
MTAFKYYLGLDMGTNSVGWAATDPEYRLLKAKGKDLWGIREFNEASGAVERRTHRISRRRRQREQVRIGILKDYFHDAICEVDPSFFRRLENSKYHEEDKDVEVRYKNNIFNDGNYTDKDYFNEYPTIYHLRNELISSTEKHDVRLVFLALLNMFKHRGHFLNAGLGENNGESNIDNAYFELTELLSELTEYHLSQDIDCKQIEAILSRRDMSRTHKAEELAGVLHVDLKNKPYKELIRGLCGLKFNACVVFPDVQSEEVTKLDICLSESSFDEKSDEIANIIGEDYFEIIMAMKEMFDIGSLASIMKGHNYLSQARVASYTKHKEDLKLLKEVIKKYCGKKEYDKFFNSDADGSYASYVGSYNSKNKERRVGNKRTSEELYKEIKKLLKDAPKEDENVQKILTSIENETFLPKQLTASNGVIPNQVHAREMKKILSNAENYLPFLTEKDETGLSVSERILKLFTFQIPYYVGPTSENSGKNGGNGWVVRREDGQVLPWNIDEKIDMKATSEAFISRMVRRCTYISGEQVLPKASLEYQSYCVLNEINNIKIDGERISVELKQDIYKAVFQKGKKVTKKQLCKYLHTRGIIETEEQVTGVDVSINNALTTYGKFKPIFGEDISKDSVQKMIEDIVFWCTVYGDSKKFLKDRIEEKYGNKLSEEQIKRILGFKFKDWGNLSKKFLELNGADTSTGESISIIRALWNNNLNLMELINSSLYNYKECLAEYQNTMLKTLSEIEAEDLNEYYFSAPVRRIIWQTILVIKELVKVLGCEPERIFVEMTRKPDEHKTRTSSRRNKFEELYKKVKDEATDWMQVIAKAEEDGKIRSKKMYLYLTQKGRCMYTGKHIELDDLFDKNLYDIDHIYPRHFVKDDNIDNNLVLVCKEKNAHKSDHYPIEEEIFLSQKKMWLELRKSGFITEEKYNRLMGRSPFSDEQKAGFIARQLVETSQGTKGVANILRQLLPGSKIVYAKASNVSEFRHTRDDIPKSRLVNDFHHAHDAYLNIVVGNVYYVKFTQNPLNFIKKDYDKYKEDYNLSKMFDWDVKRNGEVAWIAQRKDGEAGTITTVKRMLSRNTPLMTRYSFEGKGGLANETLCSAKKAKGEGYIPFKSSDDKMQDVTKYGGFTKVTGAYFFLVEHAEKKKRIRTIESVPVYLAQKIEQNPDELKKYCEEILGLVDADIRLKKIKIGSLIKRNGYFCYITGKTGNRLSVRNAVNLCLKNEWIKYISKLEKVKEKDAVDEIITKEKNEVLYSELIQKFKHGIFSKRPNPVEDKLEKGSEKFSNLSIKEQCAVLCQILQLAAVLGSECDMTLLGESAHCGKMLISKKIGDEEIYLLNQSVTGLYEKKINLHTV

SEQ ID NO: 3057 - protein, 1352 aa, unidentified
  REGION 1..1352: note = Category: MG91 effectors
  REGION 1..1352: note = Description: MG91-249 effector
  source 1..1352: note = uncultivated organism sequence
MTAFKYYLGLDMGTNSVGWAATDPEYRLLKAKGKDLWGIREFNEASGAVERRTHRISRRRRQREQVRIGILKDYFHDAICEVDPGFFRRLENSKYHEEDKDVEVRYKNNIFNDSNYTDKDYFNEYPTIYHLRNELISSTEKHDVRLVFLALLNMFKHRGHFLNAGLGENNGESNIDNAYFELTELLSELTEYHLSQDIDCKQIEAILSRRDMSRTHKAEELAGVLHVDLKNKPYKELIRGLCGLKFNACVVFPDVQSEEVTKLDICLSESTFDEKSDEIANIIGEDYFEIIMAMKEMFDIGSLASIMKGHNYLSQARVASYTKHKEDLKLLKEVIKKYCGKKEYDKFFNSDADGSYASYVGSYNSKNKERRVGNKRTSEELYKEIKKLLKDAQKEDENVQKILTSIENETFLPKQLTASNGVIPNQVHAREMKKILSNAENYLPFLTEKDETGLSVSERILKLFTFQIPYYVGPTSENSGKNGGNGWVVRREDGQVLPWNIDEKIDMKATSEAFISRMVRRCTYISGEQVLPKASLEYQSYCVLNEINNIKIDGERISVELKQDIYKAVFQKGKKVTKKQLCKYLHTRGIIETEEQVTGVDVSINNALTTYGKFKPIFGEDISKDSVQKMIEDIVFWCTVYGDSKKFLKDRIEEKYGNKLSEEQIKRILGFKFKDWGNLSKKFLELNGADTSTGESISIIRALWNNNLNLMELINSSLYNYKECLAEYQNTMLKTLSEIEAEDLNEYYFSAPVRRMIWQTILVIKELVKVLGCEPERIFVEMTRRPDEHKTRTSSRRNKFEELYKKVKDEATDWMQVIAKAEEDGKIRSKKMYLYLTQKGRCMYTGKHIELDDLFDKNLYDIDHIYPRHFVKDDNIDNNLVLVCKEKNAHKSDHYPIEEEIFLSQKKMWLELRKSGFITEEKYNRLMGRSPFSDEQKAGFIARQLVETSQGTKGVANILRQLLPGSKIVYAKASNVSEFRHTRDDIPKSRLVNDFHHAHDAYLNIVVGNVYYVKFTQNPLNFIKKDYDKYKEDYNLSKMFDWDVKRNGEVAWIAQRKDGEAGTITTVKKMLSRNTPLMTRYSFEGKGGLANETLYSAKKAKGEGYIPFKSSDDKMQDVTKYGGFTKVTGAYFFLVEHTEKKKRIRTIESVPVYFVQKIEKNPGELKKYCEEILGLVDADIRLKKIKIGSLIKRNGYFCYITGKTGNRLSVRNAVNLCLKNEWIKYISKLEKVKEKDTIDEIITKEKNEVLYSELIQKFKHCIFSKRPNPVGDKLEKGSEKFSNLSIKDQCAVLCQVLRMAAILGSECDMTLLGESSICGEMKISKKIGDEEIYLINQSVTGLYEKKINLHTV

SEQ ID NO: 3058 - protein, 1352 aa, unidentified
  REGION 1..1352: note = Category: MG91 effectors
  REGION 1..1352: note = Description: MG91-250 effector
  source 1..1352: note = uncultivated organism sequence
MTAFKYYLGLDMGTNSVGWAATDPEYRLLKAKGKDLWGIREFNEASGAVERRTHRISRRRRQREQVRIGILKDYFHDAICEVDPSFFRRLENSKYHEEDKDVEVRYKNNIFNDGNYTDKDYFNEYPTIYHLRNELISSTEKHDVRLVFLALLNMFKHRGHFLNAGLGENNGESNIDNAYFELTELLSELTEYHLSQDIDCKQIEAILSRRDMSRTHKAEELAGVLHVDLKNKPYKELIRGLCGLKFNACVVFPDVQSEEVTKLDICLSESSFDEKSDEIANIIGEDYFEIIMAMKEMFDIGSLASIMKGHNYLSQARVASYTKHKEDLKLLKEVIKKYCGKKEYDKFFNSDADGSYASYVGSYNSKNKERRVGNKRTSEELYKEIKKLLKDAPKEDENVQKILTSIENETFLPKQLTASNGVIPNQVHAREMKKILSNAENYLPFLTEKDETGLSVSERILKLFTFQIPYYVGPTSENSGKNGGNGWVVRREDGQVLPWNIDEKIDMKATSEAFISRMVRRCTYISGEQVLPKASLEYQSYCVLNEINNIKIDGERISVELKQDIYKAVFQKGKKVTKKQLCKYLHTRGIIETEEQVTGVDVSINNALTTYGKFKPIFGEDISKDSVQKMIEDIVFWCTVYGDSKKFLKDRIEEKYGNKLSEEQIKRILGFKFKDWGNLSKKFLELNGADTSTGESISIIRALWNNNLNLMELINSSLYNYKECLAEYQNTMLKTLSEIEAEDLNEYYFSAPVRRMIWQTILVIKELVKVLGCEPERIFVEMTRRPDEHKTRTSSRRNKFEELYKKVKDEATDWMQVIAKAEEDGKIRSKKMYLYLTQKGRCMYTGKHIELDDLFDKNLYDIDHIYPRHFVKDDNIDNNLVLVCKEKNAHKSDHYPIEEEIFLSQKKMWLELRKSGFITEEKYNRLMGRSPFSDEQKAGFIARQLVETSQGTKGVANILRQLLPGSKIVYAKASNVSEFRHTRDDIPKSRLVNDFHHAHDAYLNIVVGNVYYVKFTQNPLNFIKKDYDKYKEDYNLSKMFDWDVKRNGEVAWIAQRKDGEAGTITTVKRMLSRNTPLMTRYSFEGKGGLANETLCSAKKAKGEGYIPFKSSDDKMQDVTKYGGFTKVTGAYFFLVEHTEKKKRIRTIESVPVYLAQKIEQNPDELKKYCKEILGLVDADIRLKKIKIGSLIKRNGYFCYITGKTGNRLSVRNAVNLCLKNEWIKYISKLEKVKEKDAVDEIITKEKNEVLYSELIQKFKHGIFSKRPNPVEDKLEKGSEKFSNLSIKEQCAVLCQILQLAAVLGSECDMTLLGESAHCGKMLISKKIGDEEIYLLNQSVTGLYEKKINLHTV

SEQ ID NO: 3059 - protein, 1353 aa, unidentified
  REGION 1..1353: note = Category: MG91 effectors
  REGION 1..1353: note = Description: MG91-251 effector
  source 1..1353: note = uncultivated organism sequence
MAVFKYYLGLDMGTNSVGWAVTDIQYNILKVKGKDLWGIREFNEASTAVERRTHRVSRRARQRKTVLIGLLKYYFHDEICKKDPYFFQRLDNSKYHLEDKDDEVKYTYNIFNDINYTDADYFKQYPTIFHLRNELIFNPNEHDIRLVYLALLNMFKHRGHFLNDSLIDDDSEMKIDEAYLELANLLSEYTEYYLKTDVNITELENILSDRDESRTKKSEKIVELLEIDSKNKPYKEMIRGLCGLKFNAITIFSDVQLEDGQKLDICLSDASFEEKADEIASILGEDYFQIILSMKRLYDIGSLSEIMKGYSYLSEARVASYKKHKEDLCCLKRVIKKYCNKECYEKIFNSDEDGSYASYVGSFNSNSKQRRVGNKRSIEDLYKEIKKILKAVPQEDADVQRILTSIDNETFLPKQLTASNGVIPNQIHEKEMKKILSNAENYLPFLKEKDEKNQTVSERILMLFTFRIPYYVGPTTENSQKNGGNGWVIRKEAGQVLPWNIEEKIDMKATSEAFISRMIRRCTYISGKPVLPRASLEYQSFCVLNAINNITIDGYRISVELKQDIYNDLFLKGKKVTKKQLCKYLYLRGLITSENQVSGIDIEINNTLSTYKIFKNIFGDDIIYDSTKIMIEDIVFWCTVYGESKKFLRERLCEKYGDKLSQNQIKRILGLKFKDWGNLSKEFLELSGVNKKTNESMSIIKALWENNLNMMELINSDLFDFKEKIVEYQTDLMKTIYNIEVDDLENYYFSAPVKRMVWQTILVVKELVGVLGCEPTRIFIEMTRRHDEITKRTINRKKKFEALYKSVKDEDTDWMNVIADADDTGRIRSKKMYLYLTQKGRCMYTGKHIELSDLFNNNLYDIDHIYPRHFVKDDNIDNNLVLVCKEKNAHKRDIYPLEEQIYSSQKGMWLELKKLGFINEEKYNRLTGRNSFTDEQKAGFIARQLVETSQGTKGVANILQQLLPESKIVYAKASNVSEFRQSRDIPKSRLVNEFHHAHDAYLNIVVGNVYYVKFTQDPLKFIKNDYDKDKINNNYNLSKMFDWDVKRKGEVAWIAQKKNGDVGTIATVKKVLSKNTPLMTRYCFEGRGKISKEERHSAKEAKQVGYLPYKTSDLKIKDVTKYGGFTSITVAYYFVVEHDEKKKRIRTIESVPLYLAAKINSNHEELDKYCKNELGLVNFNIRVRKIRIGSLLKQNGYFFYITGKTGNRLIVRNAVNICFRKEWIKYSSKIEKYQEKKIIDDIITKDKNELFYDEFIKKYENSIFANRPNSILEKLKKAFPVFKESNIEQQCSILYQLLNLSKILGSECDLRLIGESPNCGKMLINKKIGDDDIYLINQSVTGLYENKINLRTV

SEQ ID NO: 3060 - protein, 1352 aa, unidentified
  REGION 1..1352: note = Category: MG91 effectors
  REGION 1..1352: note = Description: MG91-252 effector
  source 1..1352: note = uncultivated organism sequence
MTAFKYYLGLDMGTNSVGWAATDPGYRLLKAKGKDLWGIREFNEASGAVERRTHRISRRRRQREQVRIGILKDYFHDAICEVDPGFFQRLENSKYHEEDKDVEVRYKNNIFNDSNYTDKDYFNEYPTIYHLRNELISSTEKHDVRLVFLALLNMFKHRGHFLNAGLGENNGESNIDNAYFELTELLSELTEYHLSQDIDCKQIEAILSRRDMSRTHKAEELAGVLHVDLKNKPYKELIRGLCGLKFNACVVFPDVQSEEVTKLDICLSESTFDEKSDEIANIIGEDYFEIIMAMKEMFDIGSLASIMKGHNYLSQARVASYTKHKEDLKLLKEVIKKYCSKKEYDKFFNSDADGSYASYVGSYNSKNKERRVGNKRTSEELYKEIKKLLKDAQKEDENVQKILTSIENETFLPKQLTASNGVIPNQVHAREMKKILSNAENYLPFLTEKDETGLSVSERILKLFTFQIPYYVGPTSENSGKNGGNGWVVRREDGQVLPWNIDEKIDMKATSEAFISRMVRRCTYISGEQVLPKASLEYQSYCVLNEINNIKIDGERISVELKQDIYKAVFQKGKKVTKKQLCKYLHTRGIIETEEQVTGVDVSINNALTTYGKFKPIFGEDISKDSVQKMIEDIVFWCTVYGDSKKFLKDRIEEKYGNKLSEEQIKRILGFKFKDWGNLSKKFLELNGADTSTGESISIIRALWNNNLNLMELINSSLYNYKECLAEYQNTMLKTLSEIEAEDLNEYYFSAPVRRMIWQTILVIKELVKVLGCEPERIFVEMTRKPDEHKTRTSSRRNKFEELYKKVKDETTDWMQVIANAEEDGKIRSKKMYLYLTQKGRCMYTGKHIELDDLFDNNLYDIDHIYPRHFVKDDNIDNNLVLVCKEKNAHKSDHYPIEEEIFLSQKKMWLELRKSGFITEEKYNRLMDRNPFSDEQKAGFIARQLVETSQGTKGVANILRQLLPGSKIVYAKASNVSEFRCTRDDIQKSRLVNDFHHAHDAYLNIVVGNVYYVKFTQNPLNFIKKDYDKYKEDYNLSKMFDWDVKRNGEVAWIAQRKDGAAGTITTVKRMLSRNTPLMTRYSFDGKGGLTNETLYSAKKAKGEGYIPFKSSDDKMQDVTKYGGFTSVTGAYFFLVEHTEKKKRIRTIESVPVYLAQKIEQNPDELKKYCEEILGLIDADIRLKKIKIGSLIKRNGYFCYITGKTGNRLIVRNAVNLCLKNEWIKYISKLEKVKEKDAVDKIITKEKNEVLYSELIQKFKHGIFSKRPNPVGDKLEKDSEKFNNLSIKDQCAVLCQVLRMAAILGSECDMTLLGDSPNCGKMLISKKIGDEEIYLINQSVTGLYEKKINLHTV

SEQ ID NO: 3061 - protein, 1358 aa, unidentified
  REGION 1..1358: note = Category: MG91 effectors
  REGION 1..1358: note = Description: MG91-253 effector
  source 1..1358: note = uncultivated organism sequence
MEKEYYLGLDMGTNSVGWAVTDDAYNLIRFKGKDMWGIREFDEANPAVERRTHRTSRRREQRNAVRMGLIRSYFADEIQKVDSNFYQRLDNSFFHVEDKQDNVKDKNGIFNDKNYKDADYYKQYPTIFHLRKELIEDASQKDVRLVYLAVANMFKHRGHFLLSGIGSESSKQTITDLYNQVSGLITEEYGISLKTDIAGTDFEQVLCSREYSRTRKSEKVCEILEIKNSDKLKKAFVKSMCGLSVKITDVIDDTFTEISDEDKKITFSFVDSDYDEKAGVLEEKLGTDVYDIISKLKEIHDKAQVAEIMKNYQYLSFARVADYEKHKKDLKILKRVVKKYFEPTVYDKLFRSGENGTYSAYVNSFNSGEKSRRNYKERKQEDLYNSIKKLLKSIDNVCDTDIEYIKNEIEKENFLPKQLTFKNGVIPNQIHVSELKAILKNAEKYLPFLNEKDESGYTVSERILMLFSFQIPYYVGPVSPNSNGWVKRLEPGQVLPWNIDKKIDLKETSEQFIQRMVRNCTYIAGEKVLPKASLLYENFKVLNEINNLSINGERIAVALKQDLYNTLFLKGKRVTRKQIFNYFHSRGLVEEDSQISGIDIAVNNSLSTYGKFLPLFGEHLKEDKYKKMVDDIVFWCTVYGDSRKFLREQLEEKYSDVLDENQIKRITGMKFKDWGNLSKEFLELLGCCKSTGEMIPLIRAMWETNYNLMELLHSEEFTYSEELEEKQGKIEKVLSEYTIDDLNEEYFSAPVKRMVWQTLLIIKEIEKIMKCPPTRIFVEMTRKDDEKGDNGRKSSRKDQLLALYKKIQSEDKEWKKEMSLRIEDYDKNGALRSKKLYLYFIQKGLDMYTGKPIDLDNLMSANSNYDIDHIYPRHFVKDDNINNNLVLASKPANAEKSDIYPIKDSIYQKMKYTWKVLRDEGLITEEKYKRLTGRNPFTDEQKAGFIARQLVETGQGTKGVADLLTALLPDTKLVYSKAGNVSDFRKRYDIPKSRLINDFHHAHDAYLNIVVGNIYFTKFTSNPLNYIRKECSSKDNKYQYNLGNMYKWDVKRDGKTAWIAAKEGETGTIATVKKILSRNTPTLTRLTIEGHGGIADATLYSHKKAKQDAYIPLKSSDARMADVTKYGGYSSVTTAYLFLVEHEIKGKKIRTLETVPLYLKDRLENSKEKLEEYCRESLGYTNPSVRMKKIKLQSLIKLNGYYMQISGKSIKQFEVRNYVQICLNGKWVDYIHKLEKYQDKGVIDNAITDEKNVELYNILCEKHSVGIFTLRPNPVGDKIKKGYDKFVNLTTEEQIKLLIEIIKLTCVGIVKADLRLIGASEKSGTMKINKNITDAKECFLINQSVTGLYENRIDLLRV

SEQ ID NO: 3062 - protein, 1358 aa, unidentified
  REGION 1..1358: note = Category: MG91 effectors
  REGION 1..1358: note = Description: MG91-254 effector
  source 1..1358: note = uncultivated organism sequence
MEKEYYLGLDMGTNSVGWAVTDDAYNLIRFKGKDMWGIREFDEANPAVERRTHRTSRRRKQRNAVRMGLIRSYFADEIQKVDSNFYQRLDNSFFHVEDKQDNVKDKNGIFNDKNYKDADYYKQYPTIFHLRKELIEDASQKDVRLVYLAVANMFKHRGHFLLSGIGSESSKQTITDLYNQVSGLITEEYGISLKTDIAGTDFEQVLCSREYSRTRKSEKVCEILEIKNSDKLKKAFVKSMCGLSVKITDIIDDTFTEISDEDKKITFSFVDSDYDEKAGVLEEKLGTDVYDIISKLKEIHDKAQVAEIMKNYQYLSFARVADYEKHKKDLKILKRVVKKYFEPTVYDKLFRSEENGTYSAYVNSFNSEEKSRRNYKERKQEDLYNSIKKLLKSVDNVDDTDIEYIKNEMDKENFLPKQLTFKNGVIPNQIHASELKAILKNAEKYLPFLNEKDESGYTVSERILMLFSFQIPYYVGPVSSNSNGWVKRLEPGQVLPWNIDKKIDLKETSEQFIQRMVRNCTYIAGEKVLPKASLLYENFKVLNEINNLSINGERITVNLKQDLYNTLFLKGKRVTRKQIFNYFHSRGLVEEDSQISGIDIAVNNSLSTYGKFLPLFGEHLKEDKYKKMVDDIVFWCTVYGDSRKFLREQLEEKYSDVLDENQIKRITGMKFKDWGNLSKEFLELSGCCKSTGEVMPLIRAMWETNYNLMELLHSEEFTYSEELEEKQGKIEKVLSEYTIDDLNEEYFSAPVKRMVWQTLLIIKEIEKIMKCPPTRIFVEMTRKDDEKGDNGRKSSRKDQLLALYKKIQSEDKEWKKEMSSRIEDYDKNGALRSKKLYLYFIQKGLDMYTGKPIDLDNLMSANSNYDIDHIYPRHFVKDDNINNNLVLASKPANAEKSDIYPIKDSIYQKMKYTWKVLRDEGLITEEKYKRLTGRNPFTDEQKAGFIARQLVETGQGTKGVADLLTALLPDTKLVYSKAGNVSDFRKRYDIPKSRLINDFHHAHDAYLNIVVGNIYFTKFTSNPLNYIRKECSSKDNKYQYNLGNMYKWDVKRDGKTAWVAPEEGETGTLATVKKMLSRNTPILTRLTIEGHGGIADATLYSHKKAKQDTYIPLKSSDARMADVTKYGGYSSVTTAYLFLVEHEIKGKKIRTLETVPIYLKDRLENSKEKLEEYCRETLGYTNPSVRMKKIKLQSLIKLNGYYMQISGRTGNRFTLRNYVQLCLNGKWVDYIHKLEKYQDKGVIDDLITDERNVELYNVLCEKHSVGIFTLRPNLVGDKIKNGYDKFVNLTTEEQIKLLIEIIKLTCVGIVSANLTLIGGAAISGKMLMSKNITYANECILINQSVTGLYENRIDLLRV

SEQ ID NO: 3063 - protein, 1352 aa, unidentified
  REGION 1..1352: note = Category: MG91 effectors
  REGION 1..1352: note = Description: MG91-255 effector
  source 1..1352: note = uncultivated organism sequence
MTAFKYYLGLDMGTNSVGWAATDPEYRLLKAKGKDLWGIREFNEASGAVERRTHRISRRRRQREQVRIGILKDYFHDAICEVDPGFFQRLENSKYHEEDKDVEVRYKNNIFNDSNYTDKDYFNEYPTIYHLRNELISSTEKHDVRLVFLALLNMFKHRGHFLNAGLGENNGESNIDNAYFELTELLSELTEYHLSQDIDCKQIEAILSRRDMSRTHKAEELAGVLHVDLKNKPYKELIRGLCGLKFNACVVFPDVQSEEVTKLDICLSESTFDEKSDEIANIIGEDYFEIIMAMKEMFDIGSLASIMKGHNYLSQARVASYTKHKEDLKLLKEVIKKYCGKKEYDKFFNSDADGSYASYVGSYNSKNKERRVGNKRTSEELYKEIKKLLKDAQKEDENVQKILTSIENETFLPKQLTASNGVIPNQVHAREMKKILSNAENYLPFLTEKDETGLSVSERILKLFTFQIPYYVGPTSENSGKNGGNGWVVRREDGQVLPWNIDEKIDMKATSEAFISRMVRRCTYISGEQVLPKASLEYQSYCVLNEINNIKIDGERISVELKQDIYKAVFQKGKKVTKKQLCKYLHTRGIIETEEQVTGVDVSINNALTTYGKFKPIFGEDISKDSVQKMIEDIVFWCTVYGDSKKFLKDRIEEKYGNKLSEEQIKRILGFKFKDWGNLSKKFLELNGADTSTGESISIIRALWNNNLNLMELINSSLYNYKECLAEYQNTMLKTLSEIEAEDLNEYYFSAPVRRMIWQTILVIKELVKVLGCEPERIFVEMTRKPDEHKTRTSSRRNKFEELYKKVKDETTDWMQVIANAEEDGKIRSKKMYLYLTQKGRCMYTGKHIELDDLFDNNLYDIDHIYPRHFVKDDNIDNNLVLVCKEKNAHKSDHYPIEEEIFLSQKKMWLELRKSGFITEEKYNRLMDRNPFSDEQKAGFIARQLVETSQGTKGVANILRQLLPGSKIVYAKASNVSEFRCTRDDIQKSRLVNDFHHAHDAYLNIVVGNVYYVKFTQNPLNFIKKDYDKYKEDYNLSKMFDWDVKRNGEVAWIAQRKDGAAGTITTVKRMLSRNTPLMTRYSFDGKGGLTNETLYSAKKAKGEGYIPFKSSDDKMQDVTKYGGFTSVTGAYFFLVEHTEKKKRIRTIESVPVYLAQKIEQNPDELKKYCEEILGLIDADIRLKKIKIGSLIKRNGYFCYITGKTVNRLIVRNAVNLCLKNEWIKYISKLEKVKEKDAVDKIITKEKNEVLYSELIQKFKHGIFSKRPNPVGDKLEKDSEKFNNLSIKDQCAVLCQVLRMAAILGSECDMTLLGDSPNCGKMLISKKIGDEEIYLINQSVTGLYEKKINLHTV

SEQ ID NO: 3064 - protein, 1358 aa, unidentified
  REGION 1..1358: note = Category: MG91 effectors
  REGION 1..1358: note = Description: MG91-256 effector
  source 1..1358: note = uncultivated organism sequence
MEKEYYLGLDMGTNSVGWAVTDDAYNLIRFKGKDMWGIREFDEANPAVERRTHRTSRRREQRNAVRMGLIRSYFADEIQKVDSNFYQRLDNSFFHVEDKQDNVKDKNGIFNDKNYKDADYYKQYPTIFHLRKELIEDASQKDVRLVYLAVANMFKHRGHFLLSGIGSESSKQTITDLYNQVSGLITEEYGISLKTDIAGTDFEQVLCSREYSRTRKSEKVCEILEIKNSDKLKKAFVKSMCGLSVKITDIIDDTFTEISDEDKKITFSFVDSDYDEKAGVLEEKLGTDVYDIISKLKEIHDKAQVAEIMKNYQYLSFARVADYEKHKKDLKILKRVVKKHFEPTVYDKLFRSEENGTYSAYVNSFNSEEKSRRNYKERKHEDLYNSIKKLLKSVDNVDDTDIEYIKNEMDKENFLPKQLTFKNGVIPNQIHASELKAILKNAEKYLPFLNEKDESGYTVSERILMLFSFQIPYYVGPVSSNSNGWVKRLESGQVLPWNIDKKIDLKETSEQFIQRMVRNCTYIAGEKVLPKASLLYENFKVLNEINNLSINGERITVNLKQDLYNTLFLKGKRVTRKQIFNYFHSRGLVEEDSQISGIDIAVNNSLSTYGKFLPLFGEHLKEDKYKKMVDDIVFWCTVYGDSRKFLREQLEEKYSDVLDENQIKRITGMKFKDWGNLSKEFLELSGCCKSTGEVMPLIRAMWETNYNLMELLHSEEFTYSEELEEKQGKIEKVLSEYTIDDLNEEYFSAPVKRMVWQTLLIIKEIEKIMKCPPTRIFVEMTRKDDEKGDNGRKSSRKDQLLALYKKIQSEDKEWKKEMSSRIEDYDKNGALRSKKLYLYFIQKGLDMYTGKPIDLDNLMSANSNYDIDHIYPRHFVKDDNINNNLVLASKPANAEKSDIYPIKDSIYQKMKYTWKVLRDEGLITEEKYKRLTGRNPFTDEQKAGFIARQLVETGQGTKGVADLLTALLPDTKLVYSKAGNVSDFRKRYDIPKSRLINDFHHAHDAYLNIVVGNIYFTKFTSNPLNYIRKECSSKDNKYQYNLGNMYKWDVKRDGKTAWIAAKEGETGTIATVKKILSRNTPTLTRLTIEGHGGIADATLYSHKKAKQDAYIPLKSSDARMADVTKYGGYSSVTTAYLFLVEHEIKGKKIRTLETVPLYLKDRLENSKEKLEEYCRETLGYTNPSVRMKKIKLQSLIKLNGYYMQISGRTGNRFTLRNYVQLCLNGKWVDYIHKLEKYQDKGFIDNVITDEKNVELYNVLCEKHSVGIFTLRPNPVGDKIKKGYDKFVNLTTEEQIKLLIEIIKLTCVGIVSANLTLIGGASISGKMLISKNITDAKECLLINQSVTGLYENRIDLLRV

SEQ ID NO: 3065 - protein, 1358 aa, unidentified
  REGION 1..1358: note = Category: MG91 effectors
  REGION 1..1358: note = Description: MG91-257 effector
  source 1..1358: note = uncultivated organism sequence
MRETGKDYYLGLDMGTNSVGWAVTDENYVLMRAKGKDLWGIREFDEALTAVDRRTHRVARRRRQREIARIGLLKEYFHDAIAEVDPDFYQRLDNSKYHEEDKDSAVKGKNGIFNDANYNDKDYFKQYPTIFHLRKELIESTEKHDVRLVYLALLNMFKHRGHFLNAGLSTESENTMDTAYHNFVETAAQTIECNFMETVDIEKIKEILGSRDYSRSKKAELVAQILHVDSKNKVQMACIKCICGLKVTAAAIFGDKMAADEEKKTDICFSDFGYDEKVPVILEIVGEENFELVLAMQEIYDIGSLAGIMKDSLYLSMARVKEYEQHGKDLRILKGVVKKYGTKEEYDTLFRTMEEGTYSAYVNSVNTKKKSRRDVKKRTRDEFYGRLKKIISKMPQNDSDVLYIKDKMEKEAFLPKQLTASNGVIPNQIHAREMKKILQNAEIYLPFLKEKDTSGLTVSERILKLFSFQIPYYVGPVSEKSKLNGGNGWVVRKEEGTVLPWNIEEKIDMTATSREFVERMVRRCSYLSDERVLPKGSLLYERFCVLNEINAIKVDGVKIPVEIKQDLYSKYFKKGKKVTKKKIAEFLIARGVIKEDQTELISGIDIAVNSTLSTYAKFYAIFGEKMEQDSYKKMVEQIVEWCTIYGDAKKFLEQKIKECYGNVLTQEEIKRITGFKFRDWGRLSKEFLELSGCSKATGEVMPLISMMWETNDNLMELLDDNYYTYREALEEKQNNAFKLLADIEPEDLDEMYFSAPVKRMVWQTLCIIKELEKVLGKAPKRLFVEMTRNEQKDKKRTDSRKQQFLDLYKNIKDESRDWKELITRADENGTLKSKKMYLYLTQMGRCMYTGHPIDLEDLFKDNRYDIDHIYPRHFVKDDNIMNNLVLVEKEKNAHKSDNYPLEEEIYKKQLPMWKDLHQRKLITDEKFKRLTGRNEFTDEQKAGFIARQLVETSQGTKGVTTILERALPDTKIVYAKASNVSEFRQKRDLLKSRVVNDFHHAQDAYLNIVVGNVYFVKFTQNPLHFIKAEYDKNKAQYEYNLSRMFDRDVRRGNETAWIGCKKGEEAGTILTVKKMMAKNTPMLTRLSFEGKGGLADQTLYSAEKAKGNGYIPLKTSDSKMQDVTKYGGFNSVSTAYFFLVEHELKGKKVRTLETVPIIWRDRIEKDETMLLKYCTDVLELKNPSIRVKKIKLQSYIKKDGYYMYITGKTLNRIIIKNAVQMCLQQKWIVYIKNIEKAIQKKTIDATITYDANLELYNLIERKYKYEIFKNRPNPMGDKIEQGKKLFEEKSLLEQSKILYELLQLSAIGNVKADLQLIGGSASSGVMLIPKNITDSKEFILINQSVTGLFEQKVDLLTV

SEQ ID NO: 3066 - protein, 1358 aa, unidentified
  REGION 1..1358: note = Category: MG91 effectors
  REGION 1..1358: note = Description: MG91-258 effector
  source 1..1358: note = uncultivated organism sequence
MEKEYYLGLDMGTNSVGWAVTDDAYNLIRFKGKDMWGIREFDEANPAVERRTHRTSRRREQRNAVRMGLIRSYFADEIQKVDSNFYQRLDNSFFHVEDKQDNVKDKNGIFNDKNYKDADYYKQYPTIFHLRKELIEDASQKDVRLVYLAVANMFKHRGHFLLSGIGSESSKQTITDLYNQVSGLITEEYGISLKTDIAGTDFEQVLCSREYSRTRKSEKVCEILEIKNSDKLKKAFVKSMCGLSVKITDVIDDTFTEISDEDKKITFSFVDSDYDEKAGVLEEKLGTDVYDIISKLKEIHDKAQVAEIMKNYQYLSFARVADYEKHKKDLKILKRVVKKYFEPTVYDKLFRSGENGTYSAYVNSFNSGEKSRRNYKERKQEDLYNSIKKLLKSIDNVCDTDIEYIKNEIEKENFLPKQLTFKNGVIPNQIHVSELKAILKNAEKYLPFLNEKDESGYTVSERILMLFSFQIPYYVGPVSPNSNGWVKRLEPGQVLPWNIDKKIDLKETSEQFIQRMVRNCTYIAGEKVLPKASLLYENFKVLNEINNLSINGERITVNLKQDLYNTLFLKGKRVTRKQIFNYFHSRGLVEEDSQISGIDIAVNNSLSTYGKFLPLFGEHLKEDKYKKMVDDIVFWCTVYGDSRKFLREQLEEKYSDVLDENQIKRITGMKFKDWGNLSKEFLELSGCCKSTGEVMPLIRAMWETNYNLMELLHSEEFTYSEELEEKQGKIEKVLSEYTIDDLNEEYFSAPVKRMVWQTLLIIKEIEKIMKCPPTRIFVEMTRKDDEKGDNGRKSSRKDQLLALYKKIQSEDKEWKKEMSSRIEDYDKKGALRSKKLYLYFIQKGLDMYTGKPIDLDNLMSANSNYDIDHIYPRHFVKDDNINNNLVLASKPANAEKSDIYPIKDSIYQKMKYTWKVLRDEGLITEEKYKRLTGRNPFTDEQKAGFIARQLVETGQGTKGVADLLTALLPDTKLVYSKAGNVSDFRKKYDIPKSRLINDFHHAHDAYLNIVVGNIYFTKFTSNPLNYIRKECSSKDNKYQYNLGNMYKWDVKRDGKTAWIAAKEGETGTIATVKKMLSRNTPTLTRLTIEGHGGIADATLYSHKKAKQDAYIPLKSSDARMADVTKYGGYSSVTTAYLFLVEHEIKGKKIRTLETVPLYLKDRLENSKEKLEEYCRETLGYTNPSVRMKKIKLQSLIKLNGYYMQISGKTNKQFTVRNYVQFCLNSKWVDYIHKLEKYQDKGVIDDAITDEKNVELYNVLCEKHSVGIFTLRPNPVGDKIKKGYDKFVNLTTEEQIKLLIEIIKLTCVGIVSANLTLIGGASISGKMLISKNITDAKECLLINQSVTGLYENRIDLLRV

SEQ ID NO: 3067 - protein, 1358 aa, unidentified
  REGION 1..1358: note = Category: MG91 effectors
  REGION 1..1358: note = Description: MG91-259 effector
  source 1..1358: note = uncultivated organism sequence
MEKEYYLGLDMGTNSVGWAVTDDAYNLIRFKGKDMWGIREFDEANPAVERRTHRTLRRREQRNAVRMGLIRSYFADEIQKVDSNFYQRLDNSFFHVEDKRDNVKDKNGIFNDKNYKDADYYKQYPTIFHLRKELIEDASQKDVRLVYLAVANMFKHRGHFLLSGIGSESSKQTITDLYNQVSGLITEEYGISLKTDIAGTDFEQVLCSREYSRTRKSEKVCEILEIKNSDKLKKAFVKSMCGLSVKITDIIDDTFTEISDEDKKITFSFVDSDYDEKAGVLEEKLGTDVYDIISKLKEIHDKAQVAEIMKNYQYLSFARVADYEKHKKDLKILKRVVKKHFEPTVYDKLFRSEENGTYSAYVNSFNSGEKSRRNYKERKQEDLYNSIKKLLKSVDNVDDTDIEYIKNEMDKENFLPKQLTFKNGVIPNQIHASELKAILKNAEKYLLFLNEKDESGYTVSERILMLFSFQIPYYVGPVSSNSNGWVMRLESGQVLPWNIDKKIDLKETSEQFIQRMVRNCTYIAGEKVLPKASLLYENFKVLNEINNLSINGERITVNLKQDLYNTLFLKGKRVTRKQIFNYFHSRGLVEEDSQISGIDIAVNNSLSTYGKFLPLFGEHLKEDKYKKMVDDIVFWCTVYGDSRKFLREQLEEKYSDVLDENQIKRITGMKFKDWGNLSKEFLELSGGCKSTGEMIPLIRAMWETNYNLMELLHSEEFTYSEELEEKQGKIEKVLSEYTIDDLNEEYFSAPVKRMVWQTLLIIKEIEKIMKCPPTRIFVEMTRKDDEKGDNGRKSSRKDQLLALYKKIQSEDKEWKKEMSSRIEDYDKNGALRSKKLYLYFIQKGLDMYTGKPIDLDNLMSANSNYDIDHIYPRHFVKDDNINNNLVLASKPANAEKSDIYPIKDSIYQKMKYTWKVLRDEGLITEEKYKRLTGRNPFTDEQKAGFIARQLVETGQGTKGVADLLTALLPDTKLVYSKAGNVSDFRKMYDIPKSRLINDFHHAHDAYLNIVVGNIYFTKFTSNPLNYIRKECSSKDNKYQYNLGNMYKWDVKRDGKTAWIAAKEGETGTIATVKKMLSRNTPTLTRLTIEGHGGIADATLYSHKKAKQDAYIPLKSSDARMADVTKYGGYSSVTTAYLFLVEHEIKGKKIRTLETVPLYLKDRLENSKEKLEEYCRETLGYTNPSVRMKKIKLQSLIKLNGYYMQISGKSIKQFEVRNYVQICLNGKWVDYIHKLENYQDKGVIDNAITDEKNVELYNILCEKHSVGIFTLRPNPVGDKIKKGYDKFVNLTTEEQIKLLIEIIKLTCVGIVKADLRLIGASEKSGTMKINKNITDAKECFLINQSVTGLYENRIDLLRV

SEQ ID NO: 3068 - protein, 1352 aa, unidentified
  REGION 1..1352: note = Category: MG91 effectors
  REGION 1..1352: note = Description: MG91-260 effector
  source 1..1352: note = uncultivated organism sequence
MTAFKYYLGLDMGTNSVGWAATDPEYRLLKAKGKDLWGIREFNEASGAVERRTHRISRRRRQREQVRIGILKDYFHDAICEVDPSFFRRLENSKYHEEDKDVEVRYKNNIFNDGNYTDKDYFNEYPTIYHLRNELISSTEKHDVRLVFLALLNMFKHRGHFLNAGLGENNGESNIDNAYFELTELLSELTEYHLSQDIDCKQIEAILSRRDMSRTHKAEELAGVLHVDLKNKPYKELIRGLCGLKFNACVVFPDVQSEEVTKLDICLSESSFDEKSDEIANIIGEDYFEIIMAMKEMFDIGSLASIMKGHNYLSQARVASYTKHKEDLKLLKEVIKKYCGKKEYDKFFNSDADGSYASYVGSYNSKNKERRVGNKRTSEELYKEIKKLLKDAPKEDENVQKILTSIENETFLPKQLTASNGVIPNQVHAREMKKILSNAENYLPFLTEKDETGLSVSERILKLFTFQIPYYVGPTSENSGKNGGNGWVVRREDGQVLPWNIDEKIDMKATSEAFISRMVRRCTYISGEQVLPKASLEYQSYCVLNEINNIKIDGERISVELKQDIYKAVFQKGKKVTKKQLCKYLHTRGIIETEEQVTGVDVSINNALTTYGKFKPIFGEDISKDSVQKMIEDIVFWCTVYGDSKKFLKDRIEEKYGNKLSEEQIKRILGFKFKDWGNLSKKFLELNGADTSTGESISIIRALWNNNLNLMELINSSLYNYKECLAEYQNTMLKTLSEIEAEDLNEYYFSAPVRRIIWQTILVIKELVKVLGCEPERIFVEMTRKPDEHKTRTSSRRNKFEELYKKVKDEATDWMQVIAKAEEDGKIRSKKMYLYLTQKGRCMYTGKHIELDDLFDKNLYDIDHIYPRHFVKDDNIDNNLVLVCKEKNAHKSDHYPIEEEIFLSQKKMWLELRKSGFITEEKYNRLMGRSPFSDEQKAGFIARQLVETSQGTKGVANILRQLLPGSKIVYAKASNVSEFRHTRDDIPKSRLVNDFHHAHDAYLNIVVGNVYYVKFTQNPLNFIKKDYDKYKEDYNLSKMFDWDVKRNGEVAWIAQRKDGEAGTITTVKRMLSRNTPLMTRYSFEGKGGLANETLCSAKKAKGEGYIPFKSSDDKMQDVTKYGGFTKVTGAYFFLVEHTEKKKRIRTIESVPVYLAQKIEQNPDELKKYCEEILGLVDADIRLKKIKIGSLIKRNGYFCYITGKTGNQLSVRNAVNLCLKNEWIKYISKLEKVKEKDAVDEIITKEKNEVLYSELIQKFKHGIFSKRPNPVEDKLEKGSEKFSNLSIKEQCAVLCQILQLAAVLGSECDMTLLGESAHCGKMLISKKIGDEEIYLLNQSVTGLYEKKINLHTV

SEQ ID NO: 3069 - protein, 1352 aa, unidentified
  REGION 1..1352: note = Category: MG91 effectors
  REGION 1..1352: note = Description: MG91-261 effector
  source 1..1352: note = uncultivated organism sequence
MTAFKYYLGLDMGTNSVGWAATDPGYRLLKAKGKDLWGIREFNEASGAVERRTHRISRRRRQREQVRIGILKDYFHDAICEVDPSFFQRLENSKYHEEDKDVEVRYKNNIFNDSNYTDKDYFNEYPTIYHLRNELISSTEKHDVRLVFLALLNMFKHRGHFLNAGLGENNGESNIDNAYFELTELLSELTEYHLSQDIDCKQIEAILSRRDMSRTHKAEELAGVLHVDLKNKPYKELIRGLCGLKFNACVVFPDVQSEEVTKLDICLSESTFDEKSDEIANIIGEDYFEIIMAMKEMFDIGSLASIMKGHNYLSQARVASYTKHKEDLKLLKEVIKKYCGKKEYDKFFNSDADGSYASYVGSYNSKNKERRVGNKRTSEELYKEIKKLLKDAQKEDENVQKILTSIENETFLPKQLTASNGVIPNQVHAREMKKILSNAENYLPFLTEKDETGLSVSERILKLFTFQIPYYVGPTSENSGKNGGNGWVVRREDGQVLPWNIDEKIDMKATSEAFISRMVRRCTYISGEQVLPKASLEYQSYCVLNEINNIKIDGERISVELKQDIYKAVFQKGKKVTKKQLCKYLHTRGIIETEEQVTGVDVSINNALTTYGKFKPIFGEDISKDSVQKMIEDIVFWCTVYGDSKKFLKDRIEEKYGNKLSEEQIKRILGFKFKDWGNLSKKFLELNGADTSTGESISIIRALWNNNLNLMELINSSLYNYKECLAEYQNTMLKTLSEIEAEDLNEYYFSAPVRRMIWQTILVIKELVKVLGCEPERIFVEMTRRPDEHKTRTSSRRNKFEELYKKVKDETTDWMQVIANAEEDGKIRSKKMYLYLTQKGRCMYTGKHIELDDLFDNNLYDIDHIYPRHFVKDDNIDNNLVLVCKEKNAHKSDHYPIEEEIFLSQKKMWLELRKSGFITEEKYNRLMGRSPFSDEKKAGFIARQLVETSQGTKGVANILRQLLPGSKIVYAKASNVSEFRHTRDDIPKSRLVNDFHHAHDAYLNIVVGNVYYVKFTQNPLNFIKKDYDKYKEDYNLSKMFDWDVKRNGEVAWIAQRKDGEAGTITTVKKMLSRNTPLMTRYSFEGKGGLANETLYSAKKAKGEGYIPFKSSDDKMQDVTKYGGFTKVTGAYFFLVEHTEKKKRIRTIESVPVYLAQKIEQNPDELKKYCEEILGLVDADIRLKKIKIGSLIKRNGYFCYITGKTGNRLSVRNAVNLCLKNEWIKYISKLEKVKEKDTVDEIITKEKNEVLYSELIQKFKHGIFSKRPNPVEDKLEKGSEKFSNLSIKEQCAVLCQILQLAAVLGSECDMTLLGESAHCGKMLISKKIGDEEIYLLNQSVTGLYEKKINLHTV

SEQ ID NO: 3070 - protein, 1358 aa, unidentified
  REGION 1..1358: note = Category: MG91 effectors
  REGION 1..1358: note = Description: MG91-262 effector
  source 1..1358: note = uncultivated organism sequence
MEKEYYLGLDMGTNSVGWAVTDDAYNLIRFKGKDMWGIREFDEANPAVERRTHRTSRRREQRNAVRMGLIRSYFADEIQKVDSNFYQRLDNSFFHVEDKQDNVKDKNGIFNDKNYKDADYYKQYPTIFHLRKELIEDASQKDVRLVYLAVANMFKHRGHFLLSGIGSESSKQTITDLYNQVSGLITEEYGISLKTDIAGTDFEQVLCSREYSRTRKSEKVCEILEIKNSDKLKKAFVKSMCGLSVKITDVIDDTFTEISDEDKKITFSFVDSDYDEKAGVLEEKLGTDVYDIISKLKEIHDKAQVAEIMKNYQYLSFARVADYEKHKKDLKILKRVVKKYFEPTVYDKLFRSGENGTYSAYVNSFNSGEKSRRNYKERKQEDLYNSIKKLLKSIDNVCDTDIEYIKNEIEKENFLPKQLTFKNGVIPNQIHVSELKAILKNAEKYLPFLNEKDESGYTVSERILMLFSFQIPYYVGPVSPNSNGWVKRLEPGQVLPWNIDKKIDLKETSEQFIQRMVRNCTYIAGEKVLPKASLLYENFKVLNEINNLSINGERIAVALKQDLYNTLFLKGKKVTRKQIFNYFHSRGLVEEDSQISGIDIAVNNSLSTYGKFLPLFGEHLKEDKYKKMVDDIVFWCTVYGDSRKFLREQLEEKYSDVLDENQIKRITGMKFKDWGNLSKEFLELSGCCKSTGEMIPLIRAMWETNYNLMELLHSEEFTYSEELEEKQGKIEKVLSEYTIDDLNEEYFSAPVKRMVWQTLLIIKEIEKIMKCPPTRIFVEMTRKDDEKGDNGRKSSRKDQLLALYKKIQSEDKEWKKEMSSRIEDYDKNGALRSKKLYLYFIQKGLDMYTGKPIDLDNLMSANSNYDIDHIYPRHFVKDDNINNNLVLASKPANAEKSDIYPIKDSIYQRMKYTWKVLRDEGLITEEKYKRLTGRNPFTDEQKAGFIARQLVETGQGTKGVADLLTALLPDTKLVYSKAGNVSDFRKRYDIPKSRLINDFHHAHDAYLNIVVGNIYFTKFTSNPLNYIRKECSSKDNKYQYNLGNMYKWDVKRDGKTAWIAAKEGETGTIATVKKMLSRNTPTLTRLTIEGHGGIADATLYSHKKAKQDAYIPLKSSDARMADVTKYGGYSSVTTAYLFLVEHEIKGKKIRTLETVPLYLKDRLENSKEKLEEYCRESLGYTNPSVRMKKIKLQSLIKLNGYYMQISGKSIKQFEVRNYVQICLNGKWVDYIHKLEKYQDKGVIDNAITDEKNVELYNILCEKHSVGIFTLRPNPVGDKIKKGYDKFVNLTTEEQIKLLIEIIKLTCVGIVKADLRLIGASEKSGTMKINKNITDAKECFLINQSVTGLYENRIDLLRV

SEQ ID NO: 3071 - protein, 1175 aa, unidentified
  REGION 1..1175: note = Category: MG91 effectors
  REGION 1..1175: note = Description: MG91-263 effector
  source 1..1175: note = uncultivated organism sequence
MEKEYYLGLDMGTNSVGWAVTDDAYNLIRFKGKDMWGIREFDEANPAVERRTHRTSRRREQRNAVRMGLIRSYFADEIQKVDSNFYQRLDNSFFHVEDKQDNVKDKNGIFNDKNYKDADYYKQYPTIFHLRKELIEDASQKDVRLVYLAVANMFKHRGHFLLSGIGSESSKQTITDLYNQVSGLITEEYGISLKTDIAVTDFEQVLCSREYSRTRKSEKVCEILEIKNSDKLKKAFVKSMCGLSVKITDIIDDTFTEISDEDKKITFSFVDSDYDEKAGVLEEKLGTDVYDIISKLKEIHDKAQVAEIMKNYQYLSFARVADYEKHKKDLKILKRVVKKYFEPTIYDKLFRSEENGTYSAYVNSFNSEEKSRRNYKERKQEDLYNSIKKLLKSVDNVYDTDIEYIKNEMDKENFLPKQLTFKNGVIPNQIHASELKAILKNAEKYLPFLNEKDESGYTVSERILMLFSFQIPYYVGPVSPNSNGWVKRLEPGQVLPWNIDKKIDLKETSEQFIQRMVRNCTYIAGEKVLPKASLLYENFKVLNEINNLSISGERIAVALKQDLYNTLFLKGKRVTRKQIFNYFHSRGLVEEDSQISGIDIAVNNSLSTYGKFLPLFGDHLKEDKYKKMVDDIVFWCTVYGDSRKFLREQLEEKYSDVLDENQIKRITGMKFKDWGNLSKEFLELSGCCKSTGEVMPLIRAMWETNYNLMELLHSEEFTYSEELEEKQGKIEKVLSEYTIDNLNEEYFSAPVKRMVWQTLLIIKEIEKIMKCPPTRIFVEMTRKDDEKGDNGRKSSRKDQLLALYKKIQSEDKEWKKEMSSRIEDYDKNGALRSKKLYLYFIQKGLDMYTGKPIDLDNLMSVNSNYDIDHIYPRHFVKDDNINNNLVLASKPANAEKSDIYPIKDSIYQKMKYTWKVLRDEGLITEEKYKRLTGRNPFTDEQKAGFIARQLVETGQGTKGVADLLTALLPDTKLVYSKAGNVSDFRKKYDIPKSRLINDFHHAHDAYLNIVVGNIYFTKFTSNPLNYIRKECSSKDNKYQYNLGNMYKWDVKRDGKTAWIAAKEGETGTIATVKKMLSRNTPTLTRLTIEGHGGIADATLYSHKKAKQDTYIPLKSSDARMADVTKYGGYSSVTTAYLFLVEHEIKGKKIRTLETVPIYLKDRLENSKEKLEEYCR

SEQ ID NO: 3072 - protein, 1352 aa, unidentified
  REGION 1..1352: note = Category: MG91 effectors
  REGION 1..1352: note = Description: MG91-264 effector
  source 1..1352: note = uncultivated organism sequence
MTAFKYYLGLDMGTNSVGWAATDPEYRLLKAKGKDLWGIREFNEASGAVERRTHRISRRRRQREQVRIGILKDYFHDAICEVDPGFFQRLENSKYHEEDKDVEVRYKNNIFNDSNYTDKDYFNEYPTIYHLRNELISSTEKHDVRLVFLALLNMFKHRGHFLNAGLGENNGESNIDNAYFELTELLSELTEYHLSQDIDCKQIEAILSRRDMSRTHKAEELAGVLHVDLKNKPYKELIRGLCGLKFNACVVFPDVQSEEVTKLDICLSESTFDEKSDEIANIIGEDYFEIIMAMKEMFDIGSLASIMKGHNYLSQARVASYTKHKEDLKLLKEVIKKYCGKKEYDKFFNSDADGSYASYVGSYNSKNKERRVGNKRTSEELYKEIKKLLKDAQKEDENVQKILTSIENETFLPKQLTASNGVIPNQVHAREMKKILSNAENYLPFLTEKDETGLSVSERILKLFTFQIPYYVGPTSENSGKNGGNGWVVRREDGQVLPWNIDEKIDMKATSEAFISRMVRRCTYISGEQVLPKASLEYQSYCVLNEINNIKIDGERISVELKQDIYKAVFQKGKKVTKKQLCKYLHTRGIIETEEQVTGVDVSINNALTTYGKFKPIFGEDISKDSVQKMIEDIVFWCTVYGDSKKFLKDRIEEKYGNKLSEEQIKRILGFKFKDWGNLSKKFLELNGADTSTGESISIIRALWNNNLNLMELINSSLYNYKECLAEYQNTMLKTLSEIEAEDLNEYYFSAPVRRMIWQTILVIKELVKVLGCEPERIFVEMTRKPDEHKTRTSSRRNKFEELYKKVKDETTDWMQVIANAEEDGKIRSKKMYLYLTQKGRCMYTGKHIELDDLFDNNLYDIDHIYPRHFVKDDNIDNNLVLVCKEKNAHKSDHYPIEEEIFLSQKKMWLELRKSGFITEEKYNRLMDRNPFSDEQKAGFIARQLVETSQGTKGVANILRQLLPGSKIVYTKASNVSEFRCTRDDIQKSRLVNDFHHAHDAYLNIVVGNVYYVKFTQNPLNFIKKDYDKYKEDYNLSKMFDWDVKRNGEVAWIAQRKDGAAGTITTVKRMLSRNTPLMTRYSFDGKGGLTNETLYSAKKAKGEGYIPFKSSDDKMQDVTKYGGFTSVTGAYFFLVEHTEKKKRIRTIESVPVYLAQKIEQNPDELKKYCEEILGLIDADIRLKKIKIGSLIKRNGYFCYITGKTVNRLIVRNAVNLCLKNEWIKYISKLEKVKEKDAVDKIITKEKNEVLYSELIQKFKHGIFSKRPNPVGDKLEKDSEKFNNLSIKDQCAVLCQVLRMAAILGSECDMTLLGDSPNCGKMLISKKIGDEEIYLINQSVTGLYEKKINLHTV

SEQ ID NO: 3073 - protein, 1352 aa, unidentified
  REGION 1..1352: note = Category: MG91 effectors
  REGION 1..1352: note = Description: MG91-265 effector
  source 1..1352: note = uncultivated organism sequence
MTAFKYYLGLDMGTNSVGWAATDPEYRLLKAKGKDLWGIREFNEASGAVERRTHRISRRRRQREQVRIGILKDYFHDAICEVDPSFFRRLENSKYHEEDKDVEVRYKNNIFNDGNYTDKDYFNEYPTIYHLRNELISSTEKHDVRLVFLALLNMFKHRGHFLNAGLGENNGESNIDNAYFELTELLSELTEYHLSQDIDCKQIEAILSRRDMSRTHKAEELAGVLHVDLKNKPYKELIRGLCGLKFNACVVFPDVQSEEVTKLDICLSESSFDEKSDEIANIIGEDYFEIIMAMKEMFDIGSLASIMKGHNYLSQARVASYTKHKEDLKLLKEVIKKYCGKKEYDKFFNSDADGSYASYVGSYNSKNKERRVGNKRTSEELYKEIKKLLKDAPKEDENVQKILTSIENETFLPKQLTASNGVIPNQVHAREMKKILSNAENYLPFLTEKDETGLSVSERILKLFTFQIPYYVGPTSENSGKNGGNGWVVRREDGQVLPWNIDEKIDMKATSEAFISRMVRRCTYISGEQVLPKASLEYQSYCVLNEINNIKIDGERISVELKQDIYKAVFQKGKKVTKKQLCKYLHTRGIIETEEQVTGVDVSINNALTTYGKFKPIFGEDISKDSVQKMIEDIVFWCTVYGDSKKFLKDRIEEKYGNKLSEEQIKRILGFKFKDWGNLSKKFLELNGADTSTGESISIIRALWNNNLNLMELINSSLYNYKECLAEYQNTMLKTLSEIEAEDLNEYYFSAPVRRMIWQTILVIKELVKVLGCEPERIFVEMTRKPDEHKTRTSSRRNKFEELYKKVKDETTDWMQVIANAEEDGKIRSKKMYLYLTQKGRCMYTGKHIELDDLFDNNLYDIDHIYPRHFVKDDNIDNNLVLVCKEKNAHKSDHYPIEEEIFLSQKKMWLELRKSGFITEEKYNRLMDRNPFSDEQKAGFIARQLVETSQGTKGVANILRQLLPGSKIVYAKASNVSEFRCTRDDIQKSRLVNDFHHAHDAYLNIVVGNVYYVKFTQNPLNFIKKDYDKYKEDYNLSKMFDWDVKRNGEVAWIAQRKDGAAGTITTVKRMLSRNTPLMTRYSFDGKGGLTNETLYSAKKAKGEGYIPFKSSDDKMQDVTKYGGFTSVTGAYFFLVEHTEKKKRIRTIESVPVYLAQKIEQNPDELKKYCEEILGLIDADIRLKKIKIGSLIKRNGYFCYITGKTVNRLIVRNAVNLCLKNEWIKYISKLEKVKEKDAVDKIITKEKNEVLYSELIQKFKHGIFSKRPNPVGDKLEKDSEKFNNLSIKDQCAVLCQVLRMAAILGSECDMTLLGDSPNCGKMLISKKIGDEEIYLINQSVTGLYEKKINLHTV

SEQ ID NO: 3074 - protein, 1364 aa, unidentified
  REGION 1..1364: note = Category: MG91 effectors
  REGION 1..1364: note = Description: MG91-266 effector
  source 1..1364: note = uncultivated organism sequence
MEKEYYLGLDMGTSSVGWAVTDKEYRLLRAKGKDMWGIREFEEAQTAVERRTHRLSKRRRARQLVRIGLLKDYFHDEIMKIDPNFYIRLENSKYYLEDKDVRLASSNGIFDDKNYTDKDYYEQYKTIFHLRSELIHNSQKHDVRLVYLALLNMFKHRGHFLFEGDAYVQGNIGDIYKEFIQLLKNEYYEDENVKLTDQIDYFKLKEILSNSEFSRTAKAEKINSLVHIDKKNKLENTYIRLLCGLEIELKILFPEIDEKIKICFAKGYDEKLVEITEILTDNQLQILENLKKIHDIAALDKIRKGKEYLSDARVAEYEKHREDLALLKKIYREYMTKQDYDRMFREGEDGSYSAYVNSYNTSKKQRRNMKHRKIDEFYGTIRKDLKLLLKQGIQDDNIERILEEIDGNNDNKFMPKQLSFANGVIPNSLHKAEMKAILRNAETYLPFLLETDESGLTVSERILQLFSFHIPYYIGPVSVNSEKNNGNGWVVRREDGEVLPWNIEQKIDYGETSKRFIEKMVRRCTYISGEQVLPKNSFIYEKYCVLNEINNIKIDGERITVELKQNIYNDLYLHGKRVTKKQLINYLNNRGMIEDENQVSGIDINLNNYLGSYGKFLPIFEEKLKEDNYIKIAEDIIYLASIYGDSKKMLKSQIKSKYGDILDDKQIKRILGLKFKDWGRISRRFLELEGLDKETGEITTIIKAMWDYNLNFMEIIHSDAFDFKDKIEELHANSIKPLAEIEVEDLDDMYFSAPVKRMIWQTFKVIKEIEKVMGCPPKKVFIEMTRINDKKSKGKRTNSRKEKFLSLYKNIHDELVDWKQLIISSDESGKLNSKKMYLYLTQQGICMYTGRRINLEELFDDNKYDIDHIYPRHFVKDDNLENNLVLVEKQSNSRKSDTYPIDKSIRNNSQVYKHWKSLREGNFISKEKYDRLTGKNEFTDEQKAGFIARQMVETSQGTKGVADIIKQALPQSRIIYSKASNVSEFRRKYDILKSRTVNEFHHAHDAYLNIVVGNVYDTKFTSNPLNFIKKQYNVDRKANNYNLDKMFVYDVKRGNEIAWIGWNPKKSEDSSEMSKRGTIVTVKKMLSKNTPLMTRMSFVGHGGIAEDNLSSHFVAKNKGYMPNGKESDVTKYGGYKKAKTAYFFVVEHGQTNNRIRTIETLPIYRRREVEKYEDGLIKYCEQSLSLLNPIIIYKKIKIQSLMKINGYYAYISGKSNEVYTFRNGVNMCLSQEWINYVKKLENYIEKDRQDRMITYEKNIELYEIILRKYSTTILNKRLSKMDKKLINAKDRFCILNVKEQSQVLINVFVLSRIGDNQTDLSKIGIGKQSGQITQNKKITGCKEFKLVNQSVTGLYENEIDLLTV

SEQ ID NO: 3075 - protein, 1352 aa, unidentified
  REGION 1..1352: note = Category: MG91 effectors
  REGION 1..1352: note = Description: MG91-267 effector
  source 1..1352: note = uncultivated organism sequence
MTAFKYYLGLDMGTNSVGWAATDPEYRLLKAKGKDLWGIREFNEASGAVERRTHRISRRRKQREQVRIGILKDYFHDAICEVDPSFFQRLENSKYHEEDKDVEVRYKNNIFNDSNYTDKDYFNEYPTIYHLRNELISSTEKHDVRLVFLALLNMFKHRGHFLNAGLGENNGESNIDNAYFELTELLSELTEYHLSQDIDCKQIEAILSRRDMSRTHKAEELAGVLHVDLKNKPYKELIRGLCGLKFNACVVFPDVQSEEVTKLDICLSESTFDEKSDEIANIIGEDYFEIIMAMKEMFDIGSLASIMKGHNYLSQARVASYTKHKEDLKLLKEVIKKYCGKKEYDKFFNSDADGSYASYVGSYNSKNKERRVGNKRTSEELYKEIKKLLKDAQKEDENVQKILTSIENETFLPKQLTASNGVIPNQVHAREMKKILSNAENYLPFLTEKDETGLSVSERILKLFTFQIPYYVGPTSENSGKNGGNGWVVRREDGQVLPWNIDEKIDMKATSEAFISRMVRRCTYISGEQVLPKASLEYQSYCVLNEINNIKIDGERISVELKQDIYKAVFQKGKKVTKKQLCKYLHTRGIIETEEQVTGVDVSINNALTTYGKFKPIFGEDISKDSVQKMIEDIVFWCTVYGDSKKFLKDRIEEKYGNKLSEEQIKRILGFKFKDWGNLSKKFLELNGADTSTGESISIIRALWNNNLNLMELINSSLYNYKECLAEYQNTMLKTLSEIEAEDLNEYYFSAPVRRMIWQTILVIKELVKVLGCEPERIFVEMTRRPDEHKTRTSSRRNKFEELYKKVKDETTDWMQVIANAEEDGKIRSKKMYLYLTQKGRCMYTGKHIELDDLFDNNLYDIDHIYPRHFVKDDNIDNNLVLVCKEKNAHKSDHYPIEEEIFLSQKKMWLELRKSGFITEEKYNRLMGRSPFSDEKKAGFIARQLVETSQGTKGVANILRQLLPGSKIVYAKASNVSEFRCTRDDIQKSRLVNDFHHAHDAYLNIVVGNVYYVKFTQNPLNFIKKDYDKYKEDYNLSKMFDWDVKRNGEVAWIAQRKDGAAGTITTVKRMLSRNTPLMTRYSFDGKGGLTNETLYSAKKAKGEGYIPFKSSDDKMQDVTKYGGFTSVTGAYFFLVEHTEKKKRIRTIESVPVYLAQKIEQNPDELKKYCEEILGLIDADIRLKKIKIGSLIKRNGYFCYITGKTVNRLIVRNAVNLCLKNEWIKYISKLEKVKEKDAVDKIITKEKNEVLYSELIQKFKHGIFSKRPNPVGDKLEKDSEKFNNLSIKDQCAVLCQVLRMAAILGSECDMTLLGDSPNCGKMLISKKIGDEEIYLINQSVTGLYEKKINLHTV

SEQ ID NO: 3076 - protein, 524 aa, unidentified
  REGION 1..524: note = Category: MG91 effectors
  REGION 1..524: note = Description: MG91-268 effector
  source 1..524: note = uncultivated organism sequence
MNEVFVLELPLQVEKYQADILNRRYEQLRQLYNYVQGKLLRQYRYFEQMKEYQACKTFKEKKDFLKNHPFQIKGVYGSNKELLDITFDEYGIQGFIEKLMHKPVGADMTYADLGINTYVLDRLSSSVWAAWEKKIYDYRAKRVSFKKYGELDSFSSRRKVSSGKIYFSGMELHLDTMELAVKTNGKVGKAAKFITLPILHNPKHADYEMWALKGGIDSVKVITVVRRLVRGQYKYYVQLSIEGEKPLKGRTLGKGNVGIDLGPTTVAISGNNNVSIDKLAPKCDNIQKEITKLSRKIDRSRRANNPQNFNEDGTIKRGIRLVWNDSKRYKALRRELAELQRRQAAIRKQQHIDRANELLKEGDTFIVENNSISGWATKAKETKVSEKTGKIQKKKRFGKSIANHAPAMFVNILENKVKSLGGQVVKVDTKNAASQYDFTDNSFEKHELNERNVTLSNGDTHQRDMLAAFNLQHLKYDAEESKQYDVEAMKEDYDRFCQLEKAEVMRYKNKEKKDDRSTIGAGKL

SEQ ID NO: 3077 - protein, 1352 aa, unidentified
  REGION 1..1352: note = Category: MG91 effectors
  REGION 1..1352: note = Description: MG91-269 effector
  source 1..1352: note = uncultivated organism sequence
MTAFKYYLGLDMGTNSVGWAATDPEYRLLKAKGKDLWGIREFNEASGAVERRTHRISRRRRQREQVRIGILKDYFHDAICEVDPSFFRRLENSKYHEEDKDVEVRYKNNIFNYGNYTDKDYFNEYPTIYHLRNELISSTEKHDVRLVFLALLNMFKHRGHFLNAGLGENNGESNIDNAYFELTELLSELTEYHLSQDIDCKQIEAILSRRDMSRTHKAEELAGVLHVDLKNKPYKELIRGLCGLKFNACVVFPDVQSEEVTKLDICLSESTFDEKSDEIANIIGEDYFEINIAKKEMFDIGSLASIMKGHNYLSQARVASYTKHKEDLKLLKEVIKKYCGKKEYDKFFNSDADGSYASYVGSYNSKNKERRVGNKRTSEELYKEIKKLLKDAQKEDENVQKILTSIENETFLPKQLTASNGVIPNQVHAREMKKILSNAENYLPFLTEKDETGLSVSERILKLFTFQIPYYVGPTSENSGKNGGNGWVVRREDGQVLPWNIDEKIDMKATSEAFISRMVRRCTYISGEQVLPKASLEYQSYCVLNEINNIKIDGERISVELKQDIYKAVFQKGKKVTKKQLCKYLYTRGIIETEEQVTGVDVSINSALTTYGKFKPIFGEDISKDSVQKMIEDIVFWCTVYGDSRKFLKARIEEKYGNKLSEEQIKRILGFKFKDWGNLSKKFLELNGADTSTGESISIIRALWNNNLNLMELINSSLYNYKECLAEYQNTMLKTLSEIEAEDLNEYYFSAPVRRMIWQTILVIKELVKVLGCEPERIFVEMTRKPDEHKTRTSSRRNKFEELYKKVKDETTDWMQVIANAEEDGKIRSKKMYLYLTQKGRCMYTGKHIELDDLFDNNLYDIDHIYPRHFVKDDNIDNNLVLVCKEKNAHKSDHYPIEEEIFLSQKKMWLELRKSGFITEEKYNRLMDRNPFSDEQKAGFIARQLVETSQGTKGVANILRQLLPGSKIVYAKASNVSEFRHTRDDIPKSRLVNDFHHAHDAYLNIVVGNVYYVKFTQNPLNFIKKDYDNYKEDYNLSKMFDWDVKRNGEVAWIAQRKDGEAGTITTVKKMLSRNTPLMTRYSFEGKGGLANETLYSAKKAKGEGYIPFKSSDDKMQDVTKYGGFTKVAGAYFFLVEHTEKKKRIRTIESVPVYLTRKIEQKPGELKKYCDEILGLVDADIRLKKIKIGSLIKRNGYFCYITGKTGNQLSVRNAVNLCLKNEWIKYISKLEKVKEKDTIDKIITKEKNEVLYSELIQKFKHCIFSKRPNPVGDKLEKGSEKFSNLSIKEQCAVLCQILQLAAVLGSECDMTLLGESAHCGKMLISKKIGDEEIYLINQSVTGLYEKKINLHTV

SEQ ID NO: 3078 - protein, 1358 aa, unidentified
  REGION 1..1358: note = Category: MG91 effectors
  REGION 1..1358: note = Description: MG91-270 effector
  source 1..1358: note = uncultivated organism sequence
MEKEYYLGLDMGTNSVGWAVTDDAYNLIRFKGKDMWGIREFDEANSAVERRTHRTSRRRKQRNAVRMGLIRSYFADEIQKVDSNFYQRLDNSFFHVEDKQDNVKDKNGIFNDKNYKDADYYKQYPTIFHLRKELIEDASQKDVRLVYLAVANMFKHRGHFLLSGIGSESSKQTITDLYNQVSGLITEEYGISLKTDIAGTDFEQVLCSREYSRTRKSEKVCEILEIKNSDKLKKAFVKSMCGLSVKITDIIDDTFTEISDEDKKITFSFVDSDYDEKAGVLEEKLGTDVYDIISKLKEIHDKAQVAEIMKNYQYLSFARVADYEKHKKDLKILKRVVKKYFEPTVYDKLFRSEENGTYSAYVNSFNSEEKSRRNYKERKQEDLYNSIKKLLKSVDNVDDTDIEYIKNEMDKENFLPKQLTFKNGVIPNQIHASELKAILKNAEKYLPFLNEKDESGYTVSERILMLFSFQIPYYVGPVSSNSNGWVKRLEPGQVLPWNIDKKIDLKETSEQFIQRMVRNCTYIAGEKVLPKASLLYENFKVLNEINNLSINGERITVNLKQDLYNTLFLKGKRVTRKQIFNYFHSRGLVEEDSQISGIDIAVNNSLSTYGKFLPLFGEHLKEDKYKKMVDDIVFWCTVYGDSRKFLREQLEEKYSDVLDENQIKRITGMKFKDWGNLSKEFLELSGCCKSTGEVMPLIRAMWETNYNLMELLHSEEFTYSEELEEKQGKIEKVLSEYTIDDLNEEYFSAPVKRMVWQTLLIIKEIEKIMKCPPTRIFVEMTRKDDEKGDNGRKSSRKDQLLALYKKIQSEDKEWKKEMSSRIEDYDKKGALRSKKLYLYFIQKGLDMYTGKPIDLDNLMSANSNYDIDHIYPRHFVKDDNINNNLVLASKPANAEKSDIYPIKDSIYQKMKYTWKVLRDEGLITEEKYKRLTGRNPFTDEQKAGFIARQLVETGQGTKGVADLLTALLPDTKLVYSKAGNVSDFRKKYDIPKSRLINDFHHAHDAYLNIVVGNIYFTKFTSNPLNYIRKECSSKDNKYQYNLGNMYKWDVKRDGKTAWIAAKEGETGTIATVKKMLSRNTPTLTRLTIEGHGGIADATLYSHKKAKQDAYIPLKSSDARMADVTKYGGYSSVTTAYLFLVEHEIKGKKIRTLETVPLYLKDRLENSKEKLEEYCRETLGYTNPSVRMKKIKLQSLIKLNGYYMQISGKTNKQFTVRNYVQFCLNSKWVDYIHKLEKYQDKGVIDDAITDEKNVELYNVLCEKHSVGIFTLRPNPVGDKIKKGYDKFVNLTTEEQIKLLIEIIKLTCVGIVSANLTLIGGASISGKMLISKNITDAKECLLINQSVTGLYENRIDLLRV

SEQ ID NO: 3079 - protein, 1358 aa, unidentified
  REGION 1..1358: note = Category: MG91 effectors
  REGION 1..1358: note = Description: MG91-271 effector
  source 1..1358: note = uncultivated organism sequence
MEKEYYLGLDMGTNSVGWAVTDDAYNLIRFKGKDMWGIREFDEANPAVERRTHRTSRRREQRNAVRMGLIRSYFADEIQKVDSNFYQRLDNSFFHVEDKQDNVKDKNGIFNDKNYKDADYYKQYPTIFHLRKELIEDASQKDVRLVYLAVANMFKHRGHFLLSGIGSESSKQTITDLYNQVSGLITEEYGISLKTDIAGTDFEQVLCSREYSRTRKSEKVCEILEIKNSDKLKKAFVKSMCGLSVKITDVIDDTFTEISDEDKKITFSFVDSDYDEKAGVLEEKLGTDVYDIISKLKEIHDKAQVAEIMKNYQYLSFARVADYEKHKKDLKILKRVVKKYFEPTVYDKLFRSGENGTYSAYVNSFNSGEKSRRNYKERKQEDLYNSIKKLLKSIDNVCDTDIEYIKNEIEKENFLPKQLTFKNGVIPNQIHASELKAILKNAEKYLPFLNEKDESGYTVSERILMLFSFQIPYYVGPVSSNSNGWVKRLEPGQVLPWNIDKKIDLKETSEQFIQRMVRNCTYIAGEKVLPKASLLYENFKVLNEINNLSINGERIAVALKQDLYNTLFLKGKRVTRKQIFNYFHSRGLVEEDSQISGIDIAVNNSLSTYGKFLPLFGEHLKEDKYKKMVDDIVFWCTVYGDSRKFLREQLEEKYSDVLDENQIKRITGMKFKDWGNLSKEFLELLGCCKSTGEMIPLIRAMWETNYNLMELLHSEEFTYSEELEEKQGKIEKVLSEYTIDDLNEEYFSAPVKRMVWQTLLIIKEIEKIMKCPPTRIFVEMTRKDDEKGDNGRKSSRKDQLLALYKKIQSEDKEWKKEMSSRIEDYDKNGALRSKKLYLYFIQKGLDMYTGKPIDLDNLMSANSNYDIDHIYPRHFVKDDNINNNLVLASKPANAEKSDIYPIKDSIYQKMKYTWKVLRDEGLITEEKYKRLTGRNPFTDEQKAGFIARQLVETGQGTKGVADLLTALLPDTKLVYSKAGNVSDFRKRYDIHKSRLINDFHHAHDAYLNIVVGNIYFTKFTSNPLNYIRKECSSKDNKYQYNLGNMYKWDVKRDGKTAWIAAKEGETGTLATVKKMLSRNTPILTRLAIEGHGGIADATLYSHKKAKQDAYIPLKSSDARMADVTKYGGYSSVTTAYLFLVEHEIKGKKIRTLETVPLYLKDRLENSKEKLEEYCRETLGYTNPSVRMKKIKLQSLIKLNGYYMQISGKTNKQFTVRNYVQFCLNSKWVDYIHKLEKYQDKGVIDDAITDEKNVELYNVLCEKHSVGIFTLRPNPVGDKIKKGYDKFVNLTTEEQIKLLIEIIKLTCVGIVSANLTLIGGASISGKMLISKNITDAKECLLINQSVTGLYENRIDLLRV

SEQ ID NO: 3080 - protein, 1358 aa, unidentified
  REGION 1..1358: note = Category: MG91 effectors
  REGION 1..1358: note = Description: MG91-272 effector
  source 1..1358: note = uncultivated organism sequence
MEKEYYLGLDMGTNSVGWAVTDDAYNLIRFKGKDMWGIREFDEANPAVERRTHRTSRRREQRNAVRMGLIRSYFADEIQKVDSNFYQRLDNSFFHVEDKQDNVKDKNGIFNDKNYKDADYYKQYPTIFHLRKELIEDDSQKDVRLVYLAVANMFKHRGHFLLSGIGSESSKQTITDLYNQVSGLITEEYGISLKTDIAGTDFEQVLCSREYSRTRKSEKVCEILEIKNSDKLKKAFVKSMCGLSVKITDIIDDTFTEISDEDKKITFSFVDSDYDEKAGVLEEKLGTDVYDIISKLKEIHDKAQVAEIMKNYQYLSFARVADYEKHKKDLKILKRVVKKHFEPTVYDKLFRSEENGTYSAYVNSFNSGEKSRRNYKERKQEDLYNSIKKLLKSVDNVYDTDIEYIKNEMDKENFLPKQLTFKNGVIPNQIHASELKAILKNAEKYLPFLNEKDESGYTVSERILMLFSFQIPYYVGPVSSNSNGWVKRLESGQVLPWNIDKKIDLKETSEQFIQRMVRNCTYIAGEKVLPKASLLYENFKVLNEINNLSINGERITVNLKQDLYNTLFLKGKRVTRKQIFNYFHSRGLVEEDSQISGIDIAVNNSLSTYGKFLPLFGEHLKEDKYKKMVDDIVFWCTVYGDSRKFLREQLEEKYSDVLDENQVKRITGMKFKDWGNLSKEFLELSGCCKSTGEVMPLIRAMWETNYNLMELLHSEEFTYSEELEEKQGKIEKVLSEYTIDDLNEEYFSAPVKRMVWQTLLIIKEIEKIMKCPPTRIFVEMTRKDDEKGDNGRKSSRKDQLLALYKKIQSEDKEWKKEMSSRIEDYDKKGALRSKKLYLYFIQKGLDMYTGKPIDLDNLMSANSNYDIDHIYPRHFVKDDNINNNLVLASKPANAEKSDIYPIKDSIYQKMKYTWKVLRDEGLITEEKYKRLTGRNPFTDEQKAGFIARQLVETGQGTKGVADLLTALLPDTKLVYSKAGNVSDFRKRYDIPKSRLINDFHHAHDAYLNIVVGNIYFTKFTSNPLNYIRKECSSKDNKYQYNLGNMYKWDVKRDGKTAWVAPEEGETGTLATVKKMLSRNTPILTRLTIEGHGGIADATLYSHKKAKQDTYIPLKSSDARMADVTKYGGYSSVTTAYLFLVEHEIKGKKIRTLETVPIYLKDRLENSKEKLEEYCRETLGYTNPSVRMKKIKLQSLIKLNGYYMQISGRTGNRFTLRNYVQLCLNGKWVDYIHKLEKYQDKGVIDDLITDERNVELYNVLCEKHSVGIFTLRPNLVGDKIKNGYDKFVNLTTEEQIKLLIEIIKLTCVGIVSANLTLIGGAAISGKMLMSKNITYANECILINQSVTGLYENRIDLLRV

SEQ ID NO: 3081 - protein, 1358 aa, unidentified
  REGION 1..1358: note = Category: MG91 effectors
  REGION 1..1358: note = Description: MG91-273 effector
  source 1..1358: note = uncultivated organism sequence
MEKEYYLGLDMGTNSVGWAVTDDAYNLIRFKGKDMWGIREFDEANPAVERRTHRTSRRREQRNAVRMGLIRSYFADEIQKVDSNFYQRLDNSFFHVEDKQDNVKDKNGIFNDKNYKDADYYKQYPTIFHLRKELIEDASQKDVRLVYLAVANMFKHRGHFLLSGIGSESSKQTITDLYNQVSGLITEEYGISLKTDIAGTDFEQVLCSREYSRTRKSEKVCEILEIKNSDKLKKAFVKSMCGLSVKITDVIDDTFTEISDEDKKITFSFVDSDYDEKAGVLEEKLGTDVYDIISKLKEIHDKAQVAEIMKNYQYLSFARVADYEKHKKDLKILKRVVKKYFEPTVYDKLFRSGENGTYSAYVNSFNSGEKSRRNYKERKQEDLYNSIKKLIKSIDNVCDTDIEYIKNEIEKENFLPKQLTFKNGVIPNQIHASELKAILKNAEKYLPFLNEKDESGYTVSERILMLFSFQIPYYVGPVSSNSNGWVKRLEPGQVLPWNIDKKIDLKETSEQFIQRMVRNCTYIAGEKVLPKASLLYENFKVLNEINNLSINGERIAVALKQDLYNTLFLKGKRVTRKQIFNYFHSRGLVEEDSQISGIDIAVNNSLSTYGKFLPLFGEHLKEDKYKKMVDDIVFWCTVYGDSRKFLREQLEEKYSDVLDENQIKRITGMKFKDWGNLSKEFLELSGCCKSTGEMIPLIRAMWETNYNLMELLHSEEFTYSEELEEKQGKIEKVLSEYTIDDLNEEYFSAPVKRMVWQTLLIIKEIEKIMKCPPTRIFVEMTRKDDEKGDNGRKSSRKDQLLALYKKIQSEDKEWKKEMSSRIEDYDKNGALRSKKLYLYFIQKGLDMYTGKPIDLDNLMSANSNYDIDHIYPRHFVKDDNINNNLVLASKPANAEKSDIYPIKDSIYQKMKYTWKVLRDEGLITEEKYKRLTGRNPFTDEQKAGFIARQLVETGQGTKGVADLLTALLPGTKLVYSKAGNVSDFRKKYDIPKSRLINDFHHAHDAYLNIVVGNIYFTKFTSNPLNYIRKECSSKDNKYQYNLGNMYKWDVKRDGKTAWIAAKEGETGTLATVKKMLSRNTPILTRLAIEGHGGIADATLYSHKKAKQDAYIPLKSSDARMADVTKYGGYSSVTTAYLFLVEHEIKGKKIRTLETVPLYLKDRLENSKEKLEEYCRETLGYTNPSVRMKKIKLQSLIKLNGYYMQISGKTNKQFTVRNYVQFCLNSKWVDYIHKLEKYQDKGVIDDAITDEKNVELYNVLCEKHSVGIFTLRPNPVGDKIKKGYDKFVNLTTEEQIKLLIEIIKLTCVGIVSANLTLIGGASISGKMLISKNITDAKECLLINQSVTGLYENRIDLLRV

SEQ ID NO: 3082 - protein, 1352 aa, unidentified
  REGION 1..1352: note = Category: MG91 effectors
  REGION 1..1352: note = Description: MG91-274 effector
  source 1..1352: note = uncultivated organism sequence
MTAFKYYLGLDMGTNSVGWAATDPEYRLLKAKGKDLWGIREFNEASGAVERRTHRISRRRRQREQVRIGILKDYFHDAICEVDPSFFRRLENSKYHEEDKDVEVRYKNNIFNDGNYTDKDYFNEYPTIYHLRNELISSTEKHDVRLVFLALLNMFKHRGHFLNAGLGENNGESNIDNAYFELTELLSELTEYHLSQDIDCKQIEAILSRRDMSRTHKAEELAGVLHVDLKNKPYKELIRGLCGLKFNACVVFPDVQSEEVTKLDICLSESSFDEKSDEIANIIGEDYFEIIMAMKEMFDIGSLASIMKGHNYLSQARVASYTKHKEDLKLLKEVIKKYCGKKEYDKFFNSDADGSYASYVGSYNSKNKERRVGNKRTSEELYKEIKKLLKDAPKEDENVQKILTSIENETFLPKQLTASNGVIPNQVHAREMKKILSNAENYLPFLTEKDETGLSVSERILKLFTFQIPYYVGPTSENSGKNGGNGWVVRREDGQVLPWNIDEKIDMKATSEAFISRMVRRCTYISGEQVLPKASLEYQSYCVLNEINNIKIDGERISVELKQDIYKAVFQKGKKVTKKQLCKYLHTRGIIETEEQVTGVDVSINNALTTYGKFKPIFGEDISKDSVQKMIEDIVFWCTVYGDSKKFLKDRIEEKYGNKLSEEQIKRILGFKFKDWGNLSKKFLELNGADTSTGESISIIRALWNNNLNLMELINSSLYNYKECLAEYQNTMLKTLSEIEAEDLNEYYFSAPVRRIIWQTILVIKELVKVLGCEPERIFVEMTRKPDEHKTRTSSRRNKFEELYKKVKDEATDWMQVIAKAEEDGKIRSKKMYLYLTQKGRCMYTGKHIELDDLFDKNLYDIDHIYPRHFVKDDNIDNNLVLVCKEKNAHKSDHYPIEEEIFLSQKKMWLELRKSGFITEEKYNRLMGRSPFSDEKKAGFIARQLVETSQGTKGVANILRQLLPGSKIVYAKASNVSEFRHTRDDIPKSRLVNDFHHAHDAYLNIVVGNVYYVKFTQNPLNFIKKDYDKYKEDYNLSKMFDWDVKRNGEVAWIAQRKDGEAGTITTVKRMLSRNTPLMTRYSFEGKGGLANETLCSAKKAKGEGYIPFKSSDDKMQDVTKYGGFTKVTGAYFFLVEHTEKKKRIRTIESVPVYLAQKIEQNPDELKKYCEEILGLVDADIRLKKIKIGSLIKRNGYFCYITGKTGNRLSVRNAVNLCLKNEWIKYISKLEKVKEKDAVDEIITKEKNEVLYSELIQKFKHGIFSKRPNPVEDKLEKGSEKFSNLSIKEQCAVLCQILQLAAVLGSECDMTLLGESAHCGKMLISKKIGDEEIYLLNQSVTGLYEKKINLHTV

SEQ ID NO: 3083 - protein, 1342 aa, unidentified
  REGION 1..1342: note = Category: MG91 effectors
  REGION 1..1342: note = Description: MG91-275 effector
  source 1..1342: note = uncultivated organism sequence
MRYFMGLDMGTSSVGWAVTDEHYQLLRRKGKDMWGIREFEEAATAVERRTHRVSRRRRQRQVARIGLLQEYFHDAIHQVDPNFYQRLKNSKYHEEDKDEIVRESNGIFNDAEYTDKEYFKEFPTIFHLRQELIKSKEPHDVRLVYLALLNMFKHRGHFLNATLSADGESRKIKDIYTDFVDKAAEQLGVSFATDIRYEELENYLSSNDLSRKRKGELIAELLHVTRKDKQQYALIECMLGLDKSVKLMFGDTLPEDFDKTIKVNFSDIAFEEKATEISEAIGEEKYDLILIMKEIYDAAILNRIMNGYTYLSDARVAEYEKHKSDLACLKHYIKEYGTQHQFDFLFRGTEKGSYSAYVHSVNSHEKQRRNMDGNKKEDLYSTLKKILKDMPENEEKTYIMMQIELDNFLPKQLTASNGVIPNQIHLKEMKKILANAENYLPFLKEKDESGYTVSERIQKLFAFQIPYYIGPTTEKSAEFGGNGWVVRKEEGKVLPWNIDQKIDMKKTSEKFISRMVRRCTYMNDEQVLPKESLEYESFCVLNELNNIKVYGEKLPVDIKQDIYRTLCEKGKRVTKKSLMQYLVGRGVIKAEDEEQLTGLMDGLNNTLKSFAKFKAIFGDAIYEDSCKKMVEQIIFWCTVYGDSKHFLKEQLLEKYGEVLTDAQIKRILGIKFRDWGNLSKKFLELQGCSKETGEVNSLIRMLWETNDNLMELLAQDSYTFKEELENMQESTYKVLTELQPEDLDHMYFSAPVKRMIWQTILIIKEVTKVMGCQPERLFIEMTREHGQKNDIKDSRAKKFYELYSKIKDEDKDWRKVIEDADKDGRIRSKKMYLYLTQMGRCMYTGRPIDLDQLFNNNLYDIDHIYPRHYVKDDNLENNMVLVEKQSNAHKSDVYPLESGIYEKQVNWWRELHRKNLINDEKLKRLTGRNPFTDEQKAGFIARQLVETSQGTKGVATILQEALPDTTLVYAKARNVSEFRSDNDLLKSRIVNDFHHAHDAYLNIVIGNVYYVKFTKNPINFIREHGTYNLGKMFAKDVKRGDDIGWVAQSGNGQTATMETIKRTMARNTPLLTRMSYEVTGGLANQTLYSASKAKEGTYIPLKSSDERMQDVTKYGGFTSVSTAYFMLVEHDGKKGKRIRTIESVPIMWKERIEKNPAELERYCLEVLKLSNPDIRVRKILIQSLIKRNGYYMQITGKTGNQLYVRNTVSLCLKQEWVNYIKKLEKGNDENITKDKNLVLYDILVDKHNNTIYSQRPNPVGEKLVKRREEFINLNLNDQVTVLLEILKLTQIALGGANLELINESKTTGSMKISKTVSEEREVTLINQSVTGLYEQRVNLLTV

SEQ ID NO: 3084 - protein, 1342 aa, unidentified
  REGION 1..1342: note = Category: MG91 effectors
  REGION 1..1342: note = Description: MG91-276 effector
  source 1..1342: note = uncultivated organism sequence
MRYFMGLDMGTSSVGWAVTDEHYQLLRRKGKDMWGIREFEEAATAVERRTHRVSRRRRQRQVARIGLLQEYFHDAIHQVDPNFYQRLKNSKYHEEDKDEIVRESNGIFNDAEYTDKEYFKEFPTIFHLRQELIKSKEPHDVRLVYLALLNMFKHRGHFLNATLSADGESRKIKDIYTDFVDKAAEQLGVSFATDIRYEELENYLSSNDLSRKRKGELIAELLHVTRKDKQQYALIECMLGLDKSVKLMFGDTLPEDFDKTIKVNFSDIAFEEKATEISEAIGEEKYDLILIMKEIYDAAILNRIMNGYTYLSDARVAEYEKHKSDLACLKHYIKEYGTQQQFDFLFRGTEKGSYSAYVHSVNSHEKQRRNMAGNKKEDLYSALKKMLKDMPENEEKTCIMMQIELDNFLPKQLTASNGVIPNQIHLKEMKKILANAENYLPFLKEKDESGYTVSERIQKLFAFQIPYYIGPTTEKSAEFGGNGWVVRKEEGKVLPWNIDQKIDMKKTSEKFISRMVRRCTYMNDEQVLPKESLVYESFCVLNELNNIKVYGEKLPVDIKQDIYRTLCEKGKRVTKKSLMQYLVGRGVIKAEDEEQLTGLMDGLNNTLKSFAKFKAIFGDAIYEDSCKKMVEQIIFWCTVYGDSKHFLKEQLLEKYGEVLTGAQIKRILGIKFRDWGNLSKKFLELQGCSKETGEVNSLIRMLWETNDNLMELLAQDSYTFKEELENMQESTYKVLTELQPEDLDHMYFSAPVKRMVWQTILIIKEVTKVMGCQPERLFIEMTREHGQKNDIKDSRAKKFYELYSKIKDEDKDWRKVIEDADKDGRIRSKKMYLYLTQMGRCMYTGRPIDLDQLFNNNLYDIDHIYPRHYVKDDNLENNMVLVEKQSNAHKSDVYPLESGIYEKQVNWWRELHRKNLINDEKLKRLTGRNPFTDEQKAGFIARQLVETSQGTKGVATILQEALPDTTLVYAKARNVSEFRSDNDLLKSRIVNDFHHAHDAYLNIVIGNVYYVKFTKNPINFIREHGTYNLGKMFAKDVKRGDDIGWVAQSGNGQTATMETIKRTMARNTPLLTRMSYEVTGGLANQTLYSASRAKEGTYIPLKSSDERMQDVTKYGGFTSVSTAYFMLVEHDGKKGKRIRTIESVPIMWKERIEKNPAELERYCLDVLKLSNPDIRVRKILIQSLIKRNGYYMQITGKTGNRMYVRNMVSLCLVQDWVNYIKKLEKDKDENISKEKNIRLYDVLMDKHINTIYNTRPNPVGDLLIKRRSDFIELKITDQVIILLEILKLTQTALGSANLKLIGEAEKTGVMLISKDITALDEMLLINQSVTGLYEQRVNLLTV

SEQ ID NO: 3085 - protein, 1342 aa, unidentified
  REGION 1..1342: note = Category: MG91 effectors
  REGION 1..1342: note = Description: MG91-277 effector
  source 1..1342: note = uncultivated organism sequence
MRYFMGLDMGTSSVGWAVTDEHYQLLRRKGKDMWGIREFEEAATAVERRTHRVSRRRRQRQVARIGLLQEYFHDAIHQVDPNFYQRLKNSKYHEEDKDEIVRGSNGIFNDVEYTDKEYFKEFPTIFHLRQELIKSKEPHDVRLVYLALLNMFKHRGHFLNATLSADGESRKIKDIYTDFVDKVAEQLGVSFATDIRYEELENYLSSNDLSRKRKGELIAELLHVTRKDKQQYALIECMLGLDKSVKLMFGDTLPEDFDKTIKVNFSDIAFEEKATEISEAIGEEKYDLILIMKEIYDAAILNRIMNGYTYLSDARVAEYEKHKSDLACLKHYIKEYGTQHQFDFLFRGTEKGSYSAYVHSVNSHEKQRRNMDGNKKEDLYSTLKKILKDMPENEEKTYIMMQIELDNFLPKQLTASNGVIPNQIHLKEMKKILANAENYLPFLKEKDESGYTVSERIQKLFAFQIPYYIGPTTEKSAEFGGNGWVVRKEEGKVLPWNIDQKIDMKKTSEKFISRMVRRCTYMNDEQVLPKESLEYESFCVLNELNNIKVYGEKLPVDIKQDIYRTLCEKGKRVTKKSLMQYLVGRGVIKAEDEEQLTGLMDGLNNTLKSFAKFKAIFGDAIYEDSCKKMVEQIIFWCTVYGDSKHFLKEQLLEKYGEVLTGAQIKRILGIKFRDWGNLSKKFLELQGCSKETGEVNSLIRMLWETNDNLMELLAQDSYTFKEELENMQESAYKVLTELQPEDLDHMYFSAPVKRMIWQTILIIKEVTKVMGCQPERLFIEMTREHGQKNDIKDSRAKKFYELYSKIKDEDKDWRKVIEDADKDGRIRSKKMYLYLTQMGRCMYTGRPIDLDQLFNNNLYDIDHIYPRHYVKDDNLENNMVLVEKQSNAHKSDVYPLESGIYEKQVNWWRELHRKNLINDEKLKRLTGRNPFTDEQKAGFIARQLVETSQGTKGVATILQEALPDTTLVYAKARNVSEFRSDNDLLKSRIVNDFHHAHDAYLNIVIGNVYYVKFTKNPINFIREHGTYNLGKMFAKDVKRGDDIGWVAQSGNGQTATMETIKRTMARNTPLLTRMSYEVTGGLANQTLYSASKAKEGTYIPLKSSDERMQDVTKYGGFTSVSTAYFMLVEHDGKKGKRIRTIESVPIMWKERIEKNPAELERYCLDVLKLSNPDIRVRKILIQSLIKRNGYYMQITGKTGNQLYVRNTVSLCLKQEWVNYIKKLEKGNDENITKDKNLVLYDILVDKHNNTIYSQRPNPVGEKLVKRREEFINLNLNDQVTVLLEILKLTQIALGGANLKLIGEAEKTGVMLISKDITTLDEMLLINQSVTGLYEQKVNLLTV

SEQ ID NO: 3086 - protein, 1342 aa, unidentified
  REGION 1..1342: note = Category: MG91 effectors
  REGION 1..1342: note = Description: MG91-278 effector
  source 1..1342: note = uncultivated organism sequence
MRYFMGLDMGTSSVGWAVTDEHYQLLRRKGKDMWGIREFEEAATAVERRTHRVSRRRRQRQVARIGLLQEYFHDAIHQVDPNFYQRLKNSKYHEEDKDEIVRESNGIFNDAEYTDKEYFKEFPTIFHLRQELIKSKEPHDVRLVYLALLNMFKHRGHFLNATLSADGESRKIKDIYTDFVDKAAEQLGVSFATDIRYEELENYLSSNDLSRKRKGELIAELLHVTRKDKQQYALIECMLGLDKSVKLMFGDTLPEDFDKTIKVNFSDIAFEEKATEISEAIGEEKYDLILIMKEIYDAAILNRIMNGYTYLSDARVAEYEKHKSDLACLKHYIKEYGTQQQFDFLFRGTEKGSYSAYVHSVNSHEKQRRNMAGNKKEDLYSALKKMLKDMPENEEKTCIMMQIELDNFLPKQLTASNGVIPNQIHLKEMKKILANAENYLPFLKEKDESGYTVSERIQKLFAFQIPYYIGPTTEKSAEFGGNGWVVRKEEGKVLPWNIDQKIDMKKTSEKFISRMVRRCTYMNDEQVLPKESLEYESFCVLNELNNIKVYGEKLPVDIKQDIYRTLCEKGKRVTKKSLMQYLVGRGVIKAEDEEQLTGLMDGLNNTLKSFAKFKAIFGDAIYEDSCKKMVEQIIFWCTVYGDSKHFLKEQLLEKYGEVLTGAQIKRILGIKFRDWGNLSKKFLELQGCSKETGEVNSLIRMLWETNDNLMELLAQDSYTFKEELENMQASTYKVLTELQPEDLDHMYFSAPVKRMIWQTILIIKEVTKVMGCQPERLFIEMTREHGQKNDIKDSRAKKFYELYSKIKDEDKDWRKVIEDADKDGRIRSKKMYLYLTQMGRCMYTGRPIDLDQLFNNNLYDIDHIYPRHYVKDDNLENNMVLVEKQSNAHKSDVYPLESGIYEKQVNWWRELHRKNLINDEKLKRLTGRNPFTDEQKAGFIARQLVETSQGTKGVATILQEALPDTTLVYAKARNVSEFRSDNDLLKSRIVNDFHHAHDAYLNIVIGNVYYVKFTKNPINFIREHGTYNLGKMFAKDVKRGDDIGWVAQSGNGQTATMETIKRTMARNTPLLTRMSYEVTGGLANQTLYSASKAKEGTYIPLKSSDERMQDVTKYGGFTSVSTAYFMLVEHDGKKGKRIRTIESVPIMWKERIEKNPAELERYCLDVLKLSNPDIRVRKILIQSLIKRNGYYMQITGKTGNRMYVRNMVSLCLVQDWVNYIKKLEKDKDENISKEKNIRLYDVLMDKHINTIYNTRPNPVGDLLIKRRSDFIELKITDQVIILLEILKLTQTALGSANLKLIGEAEKTGVMLISKDITALDEMLLINQSVTGLYEQRVNLLTV

SEQ ID NO: 3087 - protein, 1342 aa, unidentified
  REGION 1..1342: note = Category: MG91 effectors
  REGION 1..1342: note = Description: MG91-279 effector
  source 1..1342: note = uncultivated organism sequence
MRYFMGLDMGTSSVGWAVTDEHYQLLRRKGKDMWGIREFEEAATAVERRTHRVSRRRRQRQVARIGLLQEYFHDAIHQVDPNFYQRLKNSKYHEEDKDEIVRESNGIFNDAEYTDKEYFKEFPTIFHLRQELIKSKEPHDVRLVYLALLNMFKHRGHFLNATLSADGESRKIKDIYTDFVDKAAEQLGVSFATDIRYEELENYLSSNDLSRKRKGELIAELLHVTRKDKQQYALIECMLGLDKSVKLMFGDTLPEDFDNTIKVNFSDIAFEEKATEISEAIGEEKYDLILIMKEIYDAAILNRIMNGYTYLSDARVAEYEKHKSDLACLKHYIKEYGTQQQFDFLFRGTEKGSYSAYVHSVNSHEKQRRNMAGNKKEDLYSALKKMLKDMPENEEKTCIMMQIELDNFLPKQLTASNGVIPNQIHLKEMKKILANAENYLPFLKEKDESGYTVSERIQKLFAFQIPYYIGPTTEKSAEFGGNGWVVRKEEGKVLPWNIDQKIDMKKTSEKFISRMVRRCTYMNDEQVLPKESLEYESFCVLNELNNIKVYGEKLPVDIKQDIYRTLCEKGKRVTKKSLMQYLVGRGVIKAEDEEQLTGLMDGLNNTLKSFAKFKAIFGDAIYEDSCKKMVEQIIFWCTVYGDSKHFLKEQLLEKYGEVLTGAQIKRILGIKFRDWGNLSKKFLELQGCSKETGEVNSLIRMLWETNDNLMELLAQDSYTFKEELENMQESTYKVLTELQPEDLDHMYFSAPVKRMIWQTILIIKEVTKVMGCQPERLFIEMTREHGQKNDIKDSRAKKFYELYSKIKDEDKDWRKVIEDADKDGRIRSKKMYLYLTQMGRCMYTGRPIDLDQLFNNNLYDIDHIYPRHYVKDDNLENNMVLVEKQSNAHKSDVYPLESGIYEKQVNWWRELHRKNLINDEKLKRLTGRNPFTDEQKAGFIARQLVETSQGTKGVATILQEALPDTTLVYAKARNVSEFRSDNDLLKSRIVNDFHHAHDAYLNIVIGNVYYVKFTKNPINFIREHGTYNLGKMFAKDVKRGDDIGWVAQSGNGQTATMETIKRTMARNTPLLTRMSYEVTGGLANQTLYSASKAKEGTYIPLKSSDERMQDVTKYGGFTSVSTAYFMLVEHDGKKGKRIRTIESVPIMWKERIEKNPAELERYCLDVLKLSNPDIRVRKILIQSLIKRNGYYMQITGKTGNQLYVRNTVSLCLKQEWVNYIKKLEKGNDENITKDKNLVLYDILVDKHNNTIYSQRPNPVGEKLVKRREEFINLNLNDQVTVLLEILKLTQIALGGANLKLIGEAEKTGVMLISKDITTLDEMLLINQSVTGLYEQKVNLLTV

SEQ ID NO: 3088 - protein, 1342 aa, unidentified
  REGION 1..1342: note = Category: MG91 effectors
  REGION 1..1342: note = Description: MG91-280 effector
  source 1..1342: note = uncultivated organism sequence
MRYFMGLDMGTSSVGWAVTDEHYQLLRRKGKDMWGIREFEEAATAVERRTHRVSRRRRQRQVARIGLLQEYFHDAIHQVDPNFYQRLKNSKYHEEDKDEIVRESNGIFNDAEYTDKEYFKEFPTIFHLRQELIKSKEPHDVRLVYLALLNMFKHRGHFLNATLSADGESRKIKDIYTDFVDKAAEQLGVSFATDIRYEELENYLSSNDLSRKRKGELIAELLHVTRKDKQQYALIECMLGLDKSVKLMFGDTLPEDFDKTIKVNFSDIAFEEKATEISEAIGEEKYDLILIMKEIYDAAILNRIMNGYTYLSDARVAEYEKHKSDLACLKHYIKEYGTQQQFDFLFRGTEKGSYSAYVHSVNSHEKQRRNMAGNKKEDLYSALKKMLKDMPENEEKTCIMMQIELDNFLPKQLTASNGVIPNQIHLKEMKKILANAENYLPFLKEKDESGYTVSERIQKLFAFQIPYYIGPTTEKSAEFGGNGWVVRKEEGKVLPWNIDQKIDMKKTSEKFISRMVRRCTYMNDEQVLPKESLEYESFCVLNELNNIKVYGEKLPVDIKQDIYRTLCEKGKRVTKKSLMQYLVGRGVIKAEDEEQLTGLMDGLNNTLKSFAKFKAIFGDAIYEDSCKKMVEQIIFWCTVYGDSKHFLKEQLLEKYGEVLTGAQIKRILGIKFRDWGNLSKKFLELQGCSKETGEVNSLIRMLWETNDNLMELLAQDSYTFKEELENMQESTYKVLTELQPEDLDHMYFSAPVKRMIWQTILIIKEVTKVMGCQPERLFIEMTREHGQKNDIKDSRAKKFYELYSKIKDEDKDWRKVIEDADKDGRIRSKKMYLYLTQMGRCMYTGRPIDLDQLFNNNLYDIDHIYPRHYVKDDNLENNMVLVEKQSNAHKSDVYPLESGIYEKQVNWWRELHRKNLINDEKLKRLTGRNPFTDEQKAGFIARQLVETSQGTKGVATILQEALPDTTLVYAKARNVSEFRSDNDLLKSRIVNDFHHAHDAYLNIVIGNVYYVKFTKNPINFIREHGTYNLGKMFAKDVKRGDDIGWVAQSGNGQTATMETIKRTMARNTPLLTRMSYEVTGGLANQTLYSASKAKEGTYIPLKSSDERMQDVTKYGGFTSVSTAYFMLVEHDGKKGKRIRTIESVPIMWKERIEKNPAELERYCLDVLKLSNPDIRVRKILIQSLIKRNGYYMQITGKTGNQLYVRNTVSLCLKQEWVNYIKKLEKGNDENITKDKNLVLYDILVDKHNNTIYSQRPNPVGEKLVKRREEFINLNLNDQVTVLLEILKLTQIALGGANLKLIGEAEKTGVMLISKDITTLDEMLLINQSVTGLYEQKVNLLTV

SEQ ID NO: 3089 - protein, 1342 aa, unidentified
  REGION 1..1342: note = Category: MG91 effectors
  REGION 1..1342: note = Description: MG91-281 effector
  source 1..1342: note = uncultivated organism sequence
MRYFMGLDMGTSSVGWAVTDEHYQLLRRKGKDMWGIREFEEAATAVERRTHRVSRRRRQRQVARIGLLQEYFHDAIHQVDPNFYQRLKNSKYHEEDKDEIVRESNGIFNDAEYTDKEYFKEFPTIFHLRQELIKSKEPHDVRLVYLALVNMFKHRGHFLNATLSADGESRKIKDIYTDFVDKAAEQLGVSFATDIRYEELENYLSSNDLSRKRKGELIAELLHVTRKDKQQYALIECMLGLDKSVKLMFGDTLPEDFDKTIKVNFSDIAFEEKATEISEAIGEEKYDLILIMKEIYDAAILNRIMNGYTYLSDARVAEYEKHKSDLACLKHYIKEYGTQQQFDFLFRGTEKGSYSAYVHSVNSHEKQRRNMAGNKKEDLYSALKKMLKDMPENEEKTCIMMQIELDNFLPKQLTASNGVIPNQIHLKEMKKILANAENYLPFLKEKDESGYTISERIQKLFAFQIPYYIGPTTEKSAEFGGNGWVVRKEEGKVLPWNIDQKIDMKKTSEKFISRMVRRCTYMNDEQVLPKESLEYESFCVLNELNNIKVYGEKLPVDIKQDIYRTLCEKGKRVTKKSLMQYLVGRGVIKAEDEEQLTGLMDGLNNTLKSFAKFKAIFGDAIYEDSCKKMVEQIIFWCTVYGDSKHFLKEQLLEKYGEVLTDAQIKRILGIKFRDWGNLSKKFLELQGCSKETGEVNSLIRMLWETNDNLMELLAQDSYTFKEELENMQESTYKVLTELQPEDLDHMYFSAPVKRMIWQTILIIKEVTKVMGCQPERLFIEMTREHGQKNDIKDSRAKKFYELYSKIKDEDKDWRKVIEDADKDGRIRSKKMYLYLTQMGRCMYTGRPIDLDQLFNNNLYDIDHIYPRHYVKDDNLENNMVLVEKQSNAHKSDVYPLESGIYEKQVNWWRELHRKNLINDEKLKRLTGRNPFTDEQKAGFIARQLVETSQGTKGVATILQEALPDTTLVYAKARNVSEFRSDNDLLKSRIVNDFHHAHDAYLNIVIGNVYYVKFTKNPINFIREHGTYNLGKMFAKDVKRGDDIGWVAQSGNGQTATMETIKRTMARNTPLLTRMSYEVTGGLANQTLYSASKAKEGTYIPLKSSDERMQDVTKYGGFTSVSTAYFMLVEHDGKKGKRIRTIESVPIMWKERIEKNPAELERYCLEVLKLSNPDIRVRKILIQSLIKRNGYYMQITGKTGNQLYVRNTVSLCLKQEWVNYIKKLEKGNDENITKDKNLVLYDILVDKHNNTIYSQRPNPVGEKLVKRREEFINLNLNDQVTVLLEILKLTQIALGGANLKLIGEAEKTGVMLISKDITTLDEMLLINQSVTGLYEQKVNLLTV

SEQ ID NO: 3090 - protein, 1342 aa, unidentified
  REGION 1..1342: note = Category: MG91 effectors
  REGION 1..1342: note = Description: MG91-282 effector
  source 1..1342: note = uncultivated organism sequence
MRYFMGLDMGTSSVGWAVTDEHYQLLRRKGKDMWGIREFEEAATAVERRTHRVSRRRRQRQVARIGLLQEYFHDAIHQVDPNFYQRLKNSKYHEEDKDEIVRESNGIFNDAEYTDKEYFKEFPTIFHLRQELIKSKEPHDVRLVYLALLNMFKHRGHFLNATLSADGESRKIKDIYTDFVDKAAEQLGVSFATDIRYEELENYLSSNDLSRKRKGELIAELLHVTRKDKQQYALIECMLGLDKSVKLMFGDTLPEDFDKTIKVNFSDIAFEEKATEISEAIGEEKYDLILIMKEIYDAAILNRIMNGYTYLSDARVAEYEKHKSDLAYLKHYIKEYGTQQQFDFLFRGTEKGSYSAYVHSVNSHEKQRRNMAGNKKEDLYSALKKMLKDMPENEEKTYIMMQIELDNFLPKQLTASNGVIPNQIHLKEMKKILANAENYLPFLKEKDESGYTVSERIQKLFAFQIPYYIGPTTEKSAEFGGNGWVVRKEEGKVLPWNIDQKIDMKKTSEKFISRMVRRCTYMNDEQVLPKESLEYESFCVLNELNNIKVYGEKLPVDIKQDIYRTLCEKGKRITKKSLMQYLVGRGVIKAEDEEQLTGLMDGLNNTLKSFAKFKAIFGDAIYEDSCKKMVEQIIFWCTVYGDSKHFLKEQLLEKYGEVLTDAQIKRILGIKFRDWGNLSKKFLGLQGCSKETGEVNSLIRMLWETNDNLMELLAQDSYTFKEELENMQESTYKVLIELQPEDLDHMYFSAPVKRMIWQTILIIKEVTKVMGCQPERLFIEMTREHGQKNDIKDSRAKKFYELYSKIKDEDKDWRKVIEDADKDGRIRSKKMYLYLTQMGRCMYTGRPIDLDQLFNNNLYDIDHIYPRHYVKDDNLENNMVLVEKQSNAHKSDVYPLESGIYEKQVNWWRELHRKNLINDEKLKRLTGRNPFTDEQKAGFIARQLVETSQGTKGVATILQEALPDTTLVYAKARNVSEFRSDNDLLKSRIVNDFHHAHDAYLNIVIGNVYYVKFTKNPINFIREHGTYNLGKMFAKDVKRGDDIGWVAQSGNGQTATMETIKRTMARNTPLLTRMSYEVTGGLANQTLYSASKAKEGTYIPLKSSDERMQDVTKYGGFTSVSTAYFMLVEHDGKKGKRIRTIESVPIMWKERIEKNPAELERYCLEVLKLSNPDIRVRKILIQSLIKRNGYYMQITGKTGNRVYVRNMVSLCLVQDWVNYIKKLEKDKDENISKEKNIRLYDVLMDKHINTIYNTRPNPVGDLLIKRRSDFIELKITDQVIILLEILKLTQTALGSANLKLIGEAEKTGVMLISKDITALEEMLLINQSVTGLYEQRVNLLTV

SEQ ID NO: 3091 - protein, 1358 aa, unidentified
  REGION 1..1358: note = Category: MG91 effectors
  REGION 1..1358: note = Description: MG91-283 effector
  source 1..1358: note = uncultivated organism sequence
MEKEYYLGLDMGTNSVGWAVTDDAYNLIRFKGKDMWGIREFDEANPAVERRTHRTSRRRKQRNAVRMGLIRSYFADEIQKVDSNFYQRLDNSFFHVEDKQDNVKDKNGIFNDKNYKDADYYKQYPTIFHLRKELIEDASQKDVRLVYLAVANMFKHRGHFLLSGIGSESSKQTITDLYNQVSGLITEEYGISLKTDIAGTDFEQVLCSREYSRTRKSEKVCEILEIKNSDKLKKAFVKSMCGLSVKITDIIDDTFTEISDEDKKITFSFVDSDYDEKAGVLEEKLGTDVYDIISKLKEIHDKAQVAEIMKNYQYLSFARVADYEKHKKDLKILKRVVKKYFEPTVYDKLFRSEENGTYSAYVNSFNSEEKSRRNYKERKQEDLYNSIKKLLKSVDNVDDTDIEYIKNEMDKENFLPKQLTFKNGVIPNQIHASELKAILKNAEKYLPFLNEKDESGYTVSERILMLFSFQIPYYVGPVSSNSNGWVKRLEPGQVLPWNIDKKIDLKETSEQFIQRMVRNCTYIAGEKVLPKASLLYENFKVLNEINNLSINGERITVNLKQDLYNTLFLKGKRVTRKQIFNYFHSRGLVEEDSQISGIDIAVNNSLSTYGKFLPLFGEHLKEDKYKKMVDDIVFWCTVYGDSRKFLREQLEEKYSDVLDENQIKRITGMKFKDWGNLSKEFLELSGCCKSTGEVMPLIRAMWETNYNLMELLHSEEFTYSEELEEKQGKIEKVLSEYTIDDLNEEYFSAPVKRMVWQTLLIIKEIEKIMKCPPTRIFVEMTRKDDEKGDNGRKSSRKDQLLALYKKIQSEDKEWKKEMSSRIEDYDKNGALRSKKLYLYFIQKGLDMYTGKPIDLDNLMSANSNYDIDHIYPRHFVKDDNINNNLVLASKPANAEKSDIYPIKDSIYQKMKYTWKVLRDEGLITEEKYKRLTGRNPFTDEQKAGFIARQLVETGQGTKGVADLLTALLPDTKLVYSKAGNVSDFRKRYDIPKSRLINDFHHAHDAYLNIVVGNIYFTKFTSNPLNYIRKECSSKDNKYQYNLGNMYKWDVKRDGKTAWVAPEEGETGTLATVKKMLSRNTPILTRLTIEGHGGIADATLYSHKKAKQDTYIPLKSSDARMADVTKYGGYSSVTTAYLFLVEHEIKGKKIRTLETVPIYLKDRLENSKEKLEEYCRETLGYTNPSVRMKKIKLQSLIKLNGYYMQISGRTGNRFTLRNYVQLCLNGKWVDYIHKLEKYQDKGVIDDLITDERNVELYNVLCEKHSVGIFTLRPNLVGDKIKNGYDKFVNLTTEEQIKLLIEIIKLTCVGIVSANLTLIGGAAISGKMLMSKNITYANECILINQSVTGLYENRIDLLGV

SEQ ID NO: 3092 - protein, 1358 aa, unidentified
  REGION 1..1358: note = Category: MG91 effectors
  REGION 1..1358: note = Description: MG91-284 effector
  source 1..1358: note = uncultivated organism sequence
MEKEYYLGLDMGTNSVGWAVTDDAYNLIRFKGKDMWGIREFDEANPAVERRTHRTSRRREQRNAVRMGLIRSYFADEIQKVDSNFYQRLDNSFFHVEDKQDNVKDKNGIFNDKNYKDADYYKQYPTIFHLRKELIEDDSQKDVRLVYLAVANMFKHRGHFLLSGIGSESSKQTITDLYNQVSGLITEEYGISLKTDIAGTDFEQVLCSREYSRTRKSEKVCEILEIKNSDKLKKAFVKSMCGLSVKITDIIDDTFTEISDEDKKITFSFVDSDYDEKAGVLEEKLGTDVYDIISKLKEIHDKAQVAEIMKNYQYLSFARVADYEKHKKDLKILKRVVKKHFEPTVYDKLFRSEENGTYSAYVNSFNSGEKSRRNYKERKQEDLYNSIKKLLKSVDNVYDTDIEYIKNEMDKENFLPKQLTFKNGVIPNQIHASELKAILKNAEKYLPFLNEKDESGYTVSERILMLFSFQIPYYVGPVSSNSNGWVKRLESGQVLPWNIDKKIDLKETSEQFIQRMVRNCTYIAGEKVLPKASLLYENFKVLNEINNLSINGERITVNLKQDLYNTLFLKGKRVTRKQIFNYFHSRGLVEEDSQISGIDIAVNNSLSTYGKFLPLFGEHLKEDKYKKMVDDIVFWCTVYGDSRKFLREQLEEKYSDVLDENQVKRITGMKFKDWGNLSKEFLELSGCCKSTGEVMPLIRAMWETNYNLMELLHSEEFTYSEELEEKQGKIEKVLSEYTIDDLNEEYFSAPVKRMVWQTLLIIKEIEKIMKCPPTRIFVEMTRKDDEKGDNGRKSSRKDQLLALYKKIQSEDKEWKKEMSSRIEDYDKKGALRSKKLYLYFIQKGLDMYTGKPIDLDNLMSANSNYDIDHIYPRHFVKDDNINNNLVLASKPANAEKSDIYPIKDSIYQKMKYTWKVLRDEGLITEEKYKRLTGRNPFTDEQKAGFIARQLVETGQGTKGVADLLTALLPDTKLVYSKAGNVSDFRKRYDIPKSRLINDFHHAHDAYLNIVVGNIYFTKFTSNPLNYIRKECSSKDNKYQYNLGNMYKWDVKRDGKTAWVAPEEGETGTLATVKKMLSRNTPILTRLTIEGHGGIADATLYSHKKAKQDTYIPLKSSDARMADVTKYGGYSSVTTAYLFLVEHEIKGKKIRTLETVPIYLKDRLENSKEKLEEYCRETLGYTNPSVRMKKIKLQSLIKLNGYYMQISGRTGNRFTLRNYVQLCLNGKWVDYIHKLEKYQDKGVIDDLITDERNVELYNVLCEKHSVGIFTLRPNLVGDKIKNGYDKFVNLTTEEQIKLLIEIIKLTCVGIVSANLTLIGGAAISGKMLMSKNITDANECILINQSVTGLYENRIDLLRV

SEQ ID NO: 3093 - protein, 1352 aa, unidentified
  REGION 1..1352: note = Category: MG91 effectors
  REGION 1..1352: note = Description: MG91-285 effector
  source 1..1352: note = uncultivated organism sequence
MTAFKYYLGLDMGTNSVGWAATDPEYRLLKAKGKDLWGIREFNEASGAVERRTHRISRRRRQREQVRIGILKDYFHDAICEVDPSFFRRLENSKYHEEDKDVEVRYKNNIFNDGNYTDKDYFNEYPTIYHLRNELISSTEKHDVRLVFLALLNMFKHRGHFLNAGLGENNGESNIDNAYFELTELLSELTEYHLSQDIDCKQIEAILSRRDMSRTHKAEELAGVLHVDLKNKPYKELIRGLCGLKFNACVVFPDVQSEEVTKLDICLSESTFDEKSDEIANIIGEDYFEIIMAMKEMFDIGSLASIMKGHNYLSQARVASYTKHKEDLKLLKEVIKKYCGKKEYDKFFNSDADGSYASYVGSYNSKNKERRVGNKRTSEELYKEIKKLLKDAQKEDENVQKILTSIENETFLPKQLTASNGVIPNQVHAREMKKILSNAENYLPFLTEKDETGLSVSERILKLFTFQIPYYVGPTSENSGKNGGNGWVVRREDGQVLPWNIDEKIDMKATSEAFISRMVRRCTYISGEQVLPKASLEYQSYCVLNEINNIKIDGERISVELKQDIYKAVFQKGKKVTKKQLCKYLYTRGIIETEEQVTGVDVSINSALTTYGKFKPIFGEDISKDSVQKMIEDIVFWCTVYGDSRKFLKARIEEKYGNKLSEEQIKRILGFKFKDWGNLSKKFLELNGADTSTGESISIIRALWNNNLNLMELINSSLYNYKECLAEYQNTMLKTLSEIEAEDLNEYYFSAPVRRMIWQTILVIKELVKVLGCEPERIFVEMTRKPDEHKTRTSSRRNKFEELYKKVKDETTDWMQVIANAEEDGKIRSKKMYLYLTQKGRCMYTGKHIELDDLFDNNLYDIDHIYPRHFVKDDNIDNNLVLVCKEKNAHKSDHYPIEEEIFLSQKKMWLELRKSGFITEEKYNRLMDRNPFSDEQKAGFIARQLVETSQGTKGVANILRQLLPGSKIVYAKASNVSEFRHTRDDIPKSRLVNDFHHAHDAYLNIVVGNVYYVKFTQNPLNFIKKDYDNYKEDYNLSKMFDWDVKRNGEVAWIAQRKDGEAGTITTVKKMLSRNTPLMTRYSFEGKGGLANETLYSAKKAKGEGYIPFKSSDDKMQDVTKYGGFTKVAGAYFFLVEHTEKKKRIRTIESVPVYLTRKIEQKPGELKKYCDEILGLVDADIRLKKIKIGSLIKRNGYFCYITGKTGNQLSVRNAVNLCLKNEWIKYISKLEKVKEKDTIDKIITKEKNEVLYSELIQKFKHCIFSKRPNPVGDKLEKGSEKFSNLSIKEQCAVLCQILQLAAVLGSECDMTLLGESAHCGKMLISKKIGDEEIYLINQSVTGLYEKKINLHTV

SEQ ID NO: 3094 - protein, 1358 aa, unidentified
  REGION 1..1358: note = Category: MG91 effectors
  REGION 1..1358: note = Description: MG91-286 effector
  source 1..1358: note = uncultivated organism sequence
MEKEYYLGLDMGTNSVGWAVTDDAYNLIRFKGKDMWGIREFDEANPAVERRTHRTSRRREQRNAVRMGLIRSYFADEIQKVDSNFYQRLDNSFFHVEDKQDNVKDKNGIFNDKNYKDADYYKQYPTIFHLRKELIEDASQKDVRLVYLAVANMFKHRGHFLLSGIGSESSKQTITDLYNQVSGLITEEYGISLKTDIAGTDFEQVLCSREYSRTRKSEKVCEILEIKNSDKLKKAFVKSMCGLSVKITDIIDDTFTEISDEDKKITFSFVDSDYDEKAGVLEEKLGTDVYDIISKLKEIHDKAQVAEIMKNYQYLSFARVADYEKHKKDLKILKRVVKKYFEPTVYDKLFRSEENGTYSAYVNSFNSEEKSRRNYKERKQEDLYNSIKKLLKSIDNVDDTDIEYIKNEMDKENFLPKQLTFKNGVIPNQIHASELKAILKNAEKYLPFLNEKDESGYTVSERILMLFSFQIPYYVGPVSSNSNGWVKRLEPGQVLPWNIDKKIDLKETSEQFIQRMVRNCTYIAGEKVLPKASLLYENFKVLNEINNLSINGERITVNLKQDLYNTLFLKGKRVTRKQIFNYFHSRGLVEEDSQISGIDITVNNSLSTYGKFLPLFGEHLKEDKYKKMVDDIVFWCTVYGDSRKFLREQLEEKYSDVLDENQIKRITGMKFKDWGNLSKEFLELSGCCKSTGEVMPLIRAMWETNYNLMELLHSEEFTYSEELEEKQGKIEKVLSEYTIDDLNEEYFSAPVKRMVWQTLLIIKEIEKIMKCPPTRIFVEMTRKDDEKGDNGRKSSRKDQLLALYKKIQSEDKEWKKEMSSRIEDYDKKGALRSKKLYLYFIQKGLDMYTGKPIDLDNLMSANSNYDIDHIYPRHFVKDDNINNNLVLASKPANAEKSDIYPIKDSIYQKMKYTWKVLRDEGLITEEKYKRLTGRNPFTDEQKAGFIARQLVETGQGTKGVADLLTALLPDTKLVYSKAGNVSDFRKKYDIPKSRLINDFHHAHDAYLNIVVGNIYFTKFTSNPLNYIRKECSSKDNKYQYNLGNMYKWDVKRDGKTAWIAAKEGETGTIATVKKMLSRNTPTLTRLTIEGHGGIADATLYSHKKAKQDAYIPLKSSDARMADVTKYGGYSSVTTAYLFLVEHEIKGKKIRTLETVPLYLKDRLENSKEKLEEYCRETLGYTNPSVRMKKIKLQSLIKLNGYYMQISGKTNKQFTVRNYVQFCLNSKWVDYIHKLEKYQDKGVIDDAITDEKNVELYNVLCEKHSVGIFTLRPNPVGDKIKKGYDKFVNLTTEEQIKLLIEIIKLTCVGIVSANLTLIGGASISGKMLISKNITDAKECLLINQSVTGLYENRIDLLRV

SEQ ID NO: 3095 - protein, 1358 aa, unidentified
  REGION 1..1358: note = Category: MG91 effectors
  REGION 1..1358: note = Description: MG91-287 effector
  source 1..1358: note = uncultivated organism sequence
MEKEYYLGLDMGTNSVGWAVTDDAYNLIRFKGKDMWGIREFDEANPAVERRTHRTSRRREQRNAVRMGLIRSYFADEIQKVDSNFYQRLDNSFFHVEDKQDNVKDKNGIFNDKNYKDADYYKQYPTIFHLRKELIEDASQKDVRLVYLAVANMFKHRGHFLLSGIGSESSKQTITDLYNQVSGLITEEYGISLKTDIAGTDFEQVLCSREYSRTRKSEKVCEILEIKNSDKLKKAFVKSMCGLSVKITDIIDDTFTEISDEDKKITFSFVDSDYDEKAGVLEEKLGTDVYDIISKLKEIHDKAQVAEIMKNYQYLSFARVADYEKHKKDLKILKRVVKKYFEPTVYDKLFRSEENGTYSAYVNSFNSEEKSRRNYKERKQEDLYNSIKKLLKSVDNVDDTDIEYIKNEMDKENFLPKQLTFKNGVIPNQIHASELKAILKNAEKYLPFLNEKDESGYTVSERILMLFSFQIPYYVGPVSSNSNGWVKRLEPGQVLPWNIDKKIDLKETSEQFIQRMVRNCTYIAGEKVLPKASLLYENFKVLNEINNLSINGERITVNLKQDLYNTLFLKGKRVTRKQIFNYFHSRGLVEEDSQISGIDIAVNNSLSTYGKFLPLFGEHLKEDKYKKMVDDIVFWCTVYGDSRKFLREQLEEKYSDVLDENQIKRITGMKFKDWGNLSKEFLELSGCCKSTGEVMPLIRAMWETNYNLMELLHSEEFTYSEELEEKQGKIEKVLSEYTIDDLNEEYFSAPVKRMVWQTLLIIKEIEKIMKCPPTRIFVEMTRKDDEKGDNGRKSSRKDQLLALYKKIQSEDKEWKKEMSSRIEDYDKNGALRSKKLYLYFIQKGLDMYTGKPIDLDNLMSANSNYDIDHIYPRHFVKDDNINNNLVLASKPANAEKSDIYPIKDSIYQKMKYTWKVLRDEGLITEEKYKRLTGRNPFTDEQKAGFIARQLVETGQGTKGVADLLTALLPDTKLVYSKAGNVSDFRKRYDIPKSRLINDFHHAHDAYLNIVVGNIYFTKFTSNPLNYIRKECSSKDNKYQYNLGNMYKWDVKRDGKTAWVAPEEGETGTLATVKKMLSRNTPILTRLTIEGHGGIADATLYSHKKAKQDTYIPLKSSDARMADVTKYGGYSSVTTAYLFLVEHEIKGKKIRTLETVPIYLKDRLENSKEKLEEYCRETLGYTNPSVRMKKIKLQSLIKLNGYYMQISGRTGNRFTLRNYVQLCLNGKWVDYIHKLEKYQDKGVIDDLITDERNVELYNVLCEKHSVGIFTLRPNLVGDKIKNGYDKFVNLTTEEQIKLLIEIIKLTCVGIVSANLTLIGGAAISGKMLMSKNITDANECILINQSVTGLYENRIDLLRV

SEQ ID NO: 3096 - protein, 1358 aa, unidentified
  REGION 1..1358: note = Category: MG91 effectors
  REGION 1..1358: note = Description: MG91-288 effector
  source 1..1358: note = uncultivated organism sequence
MEKEYYLGLDMGTNSVGWAVTDDAYNLIRFKGKDMWGIREFDEANPAVERRTHRTSRRREQRNAVRMGLIRSYFADEIQKVDSNFYQRLDNSFFYVEDKQDNVKDKNGIFNDKNYKDADYYKQYPTIFHLRKELIEDASQKDVRLVYLAVANMFKHRGHFLLSGIGSESSKQTITDLYNQVSGLITEEYGISLKTDIAGTDFEQVLCSREYSRTRKSEKVCEILEIKNSDKLKKAFVKSMCGLSVKITDIIDDTFTEISDEDKKITFSFVDSDYDEKAGVLEEKLGTDVYDIISKLKEIHDKAQVAEIMKNYQYLSFARVADYEKHKKDLKILKRVVKKYFEPTVYDKLFRSEENGTYSAYVNSFNSEEKSRRNYKERKQEDLYNSIKKLLKSVDNVDDTDIEYIKNEMDKENFLPKQLTFKNGVIPNQIHASELKAILKNAEKYLPFLNEKDESGYTVSERILMLFSFQIPYYVGPVSSNSNGWVKRLEPGQVLPWNIDKKIDLKETSEQFIQRMVRNCTYIAGEKVLPKDSLLYENFKVLNEINNLSINGERITVNLKQDLYNTLFLKGKRVTRKQIFNYFHSRGLVEEDSQISGIDIAVNNSLSTYGKFLPLFGEHLKEDKYKKMVDDIVFWCTVYGDSRKFLREQLEEKYSDVLDENQIKRITGMKFKDWGNLSKEFLELSGCCKSTGEVMPLIRAMWETNYNLMELLHSEEFTYSEELEEKQGKIEKVLSEYTIDDLNEEYFSAPVKRMVWQTLLIIKEIEKIMKCPPTRIFVEMTRKDDEKGDNGRKSSRKDQLLALYKKIQSEDKEWKKEMSSRIEDYDKKGALRSKKLYLYFIQKGLDMYTGKPIDLDNLMSANSNYDIDHIYPRHFVKDDNINNNLVLASKPANAEKSDIYPIKDSIYQKMKYTWKVLRDEGLITEEKYKRLTGRNPFTDEQKAGFIARQLVETGQGTKGVADLLTALLPDTKLVYSKAGNVSDFRKKYDIPKSRLINDFHHAHDAYLNIVVGNIYFTKFTSNPLNYIRKECSSKDNKYQYNLGNMYKWDVKRDGKTAWIAAKEGETGTIATVKKMLSRNTPTLTRLTIEGHGGIADATLYSHKKAKQDAYIPLKSSDARMADVTKYGGYSSVTTAYLFLVEHEIKGKKIRTLETVPLYLKDILENSKEKLEEYCRETLGYTNPSVRMKKIKLQSLIKLNGYYMQISGKTNKQFTVRNYVQFCLNSKWVDYIHKLEKYQDKGVIDDAITDEKNVELYNVLCEKHSVGIFTLRPNPVGDKIKKGYDKFVNLTTEEQIKLLIEIIKLTCVGIVSANLTLIGGASISGKMLISKNITDAKECLLINQSVTGLYENRIDLLRV

SEQ ID NO: 3097 - protein, 1358 aa, unidentified
  REGION 1..1358: note = Category: MG91 effectors
  REGION 1..1358: note = Description: MG91-289 effector
  source 1..1358: note = uncultivated organism sequence
MEKEYYLGLDMGTNSVGWAVTDDAYNLIRFKGKDMWGIREFDEANPAVERRTHRTSRRRKQRNAVRMGLIRSYFADEIQKVDSNFYQRLDNSFFHVEDKQDNVKDKNGIFNDKNYKDADYYKQYPTIFHLRKELIEDASQKDVRLVYLAVANMFKHRGHFLLSGIGSESSKQTITDLYNQVSGLITEEYGISLKTDIAGTDFEQVLCSREYSRTRKSEKVCEILEIKNSDKLKKAFVKSMCGLSVKITDIIDDTFTEISDEDKKITFSFVDSDYDEKAGVLEEKLGTDVYDIISKLKEIHDKAQVAEIMKNYQYLSFARVADYEKHKKDLKILKRVVKKYFEPTVYDKLFRSEENGTYSAYVNSFNSEEKSRRNYKERKQEDLYNSIKKLLKSVDNVDDTDIEYIKNEMDKENFLPKQLTFKNGVIPNQIHASELKAILKNAEKYLPFLNEKDELGYTVSERILMLFSFQIPYYVGPVSSNSNGWVKRLEPGQVLPWNIDKKIDLKETSEQFIQRMVRNCTYIAGEKVLPKASLLYENFKVLNEINNLSINGERITVNLKQDLYNTLFLKGKRVTRKQIFNYFHSRGLVEEDSQISGIDIAVNNSLSTYGKFLPLFGEHLKEDKYKKMVDDIVFWCTVYGDSRKFLREQLEEKYSDVLDENQIKRITGMKFKDWGNLSKEFLELSGCCKSTGEVMPLIRAMWETNYNLMELLHSEEFTYSEELEEKQGKIEKVLSEYTIDDLNEEYFSAPVKRMVWQTLLIIKEIEKIMKCPPTRIFVEMTRKDDEKGDNGRKSSRKDQLLALYKKIQSEDKEWKKEMSSRIEDYDKNGALRSKKLYLYFIQKGLDMYTGKPIDLDNLMSANSNYDIDHIYPRHFVKDDNINNNLVLASKPANAEKSDIYPIKDSIYQKMKYTWKVLRDEGLITEEKYKRLTGRNPFTDEQKAGFIARQLVETGQGTKGVADLLTALLPDTKLVYSKAGNVSDFRKRYDIPKSRLINDFHHAHDAYLNIVVGNIYFTKFTSNPLNYIRKECSSKDNKYQYNLGNMYKWDVKRDGKTAWVAPEEGETGTLATVKKMLSRNTPILTRLTIEGHGGIADATLYSHKKAKQDTYIPLKSSDARMADVTKYGGYSSVTTAYLFLVEHEIKGKKIRTLETVPIYLKDRLENSKEKLEEYCRETLGYTNPSVRMKKIKLQSLIKLNGYYMQISGRTGNRFTLRNYVQLCLNGKWVDYIHKLEKYQDKGVIDDLITDERNVELYNVLCEKHSVGIFTLRPNLVGDKIKNGYDKFVNLTTEEQIKLLIEIIKLTCVGIVSANLTLIGGAAISGKMLMSKNITYANECILINQSVTGLYENRIDLLRV

SEQ ID NO: 3098 - protein, 1358 aa, unidentified
  REGION 1..1358: note = Category: MG91 effectors
  REGION 1..1358: note = Description: MG91-290 effector
  source 1..1358: note = uncultivated organism sequence
MEKEYYLGLDMGTNSVGWAVTDDAYNLIRFKGKDMWGIREFDEANPAVERRTHRTSRRREQRNAVRMGLIRSYFADEIQKVDSNFYQRLDNSFFHVEDKQDNVKDKNGIFNDKNYKDADYYKQYPTIFHLRKELIEDASQKDVRLVYLAVANMFKHRGHFLLSGIGSESSKQTITDLYNQVSGLITEEYGISLKTDIAGTDFEQVLCSREYSRTRKSEKVCEILEIKNSDKLKKAFVKSMCGLSVKITDVIDDTFTEISDEDKKITFSFVDSDYDEKAGVLEEKLGTDVYDIISKLKEIHDKAQVAEIMKNYQYLSFARVADYEKHKKDLKILKRVVKKYFEPTVYDKLFRSGENGTYSAYVNSFNSGEKSRRNYKERKQEDLYNSIKKLIKSIDNVCDTDIEYIKNEIEKENFLPKQLTFKNGVIPNQIHASELKAILKNAEKYLPFLNEKDESGYTVSERILMLFSFQIPYYVGPVSPNSNGWVKRLEPGQVLPWNIDKKIDLKETSEQFIQRMVRNCTYIAGEKVLPKASLLYENFKVLNEINNLSINGERIAVALKQDLYNTLFLKGKRVTRKQIFNYFHSRGLVEEDSQISGIDIAVNNSLSTYGKFLPLFGEHLKEDKYKKMVDDIVFWCTVYGDSRKFLREQIEEKYSDVLDENQIKRITGMKFKDWGNLSKEFLELSGCCKSTGEMIPLIRAMWETNYNLMELLHSEEFTYSEELEEKQGKIEKVLSEYTIDDLNEEYFSAPVKRMVWQTLLIIKEIEKIMKCPPTRIFVEMTRKDDEKGDNGRKSSRKDQLLALYKKIQSEDKEWKKEMSSRIEDYDKNGALRSKKLYLYFIQKGLDMYTGKPIDLDNLMSANSNYDIDHIYPRHFVKDDNINNNLVLASKPANAEKSDIYPIKDSIYQKMKYTWKVLRDEGLITEEKYKRLTGRNPFTDEQKAGFIARQLVETGQGTKGVADLLTALLPDTKLVYSKAGNVSDFRKRYDIPKSRLINDFHHAHDAYLNIVVGNIYFTKFTSNPLNYIRKECSSKDNKYQYNLGNMYKWDVKRDGKTAWIAAKEGETGTIATVKKILSRNTPTLTRLTIEGHGGIADATLYSHKKAKQDAYIPLKSSDARMADVTKYGGYSSVTTAYLFLVEHEIKGKKIRTLETVPLYLKDRLENSKEKLEEYCRESLGYTNPSVRMKKIKLQSLIKLNGYYMQISGKSIKQFEVRNYVQICLNGKWVDYIHKLEKYQDKGVIDNAITDEKNVELYNILCEKHSVGIFTLRPNPVGDKIKKGYDKFVNLTTEEQIKLLIEIIKLTCVGIVKADLRLIGASEKSGTMKINKNITDAKECFLINQSVTGLYENRIDLLRV

SEQ ID NO: 3099 - protein, 1352 aa, unidentified
  REGION 1..1352: note = Category: MG91 effectors
  REGION 1..1352: note = Description: MG91-291 effector
  source 1..1352: note = uncultivated organism sequence
MTAFKYYLGLDMGTNSVGWAATDPEYRLLKAKGKDLWGIREFNEASGAVERRTHRISRRRRQREQVRIGILKDYFHDAICEVDPGFFQRLENSKYHEEDKDVEVRYKNNIFNDSNYTDKDYFNEYPTIYHLRNELISSTEKHDVRLVFLALLNMFKHRGHFLNAGLGENNGESNIDNAYFELTELLSELTEYHLSQDIDCKQIEAILSRRDMSRTHKAEELAGVLHVDLKNKPYKELIRGLCGLKFNACVVFPDVQSEEVTKLDICLSESTFDEKSDEIANIIGEDYFEIIMAMKEMFDIGSLASIMKGHNYLSQARVASYTKHKEDLKLLKEVIKKYCGKKEYDKFFNSDADGSYASYVGSYNSKNKERRVGNKRTSEELYKEIKKLLKDAQKEDENVQKILTSIENETFLPKQLTASNGVIPNQVHAREMKKILSNAENYLPFLTEKDETGLSVSERILKLFTFQIPYYVGPTSENSGKNGGNGWVVRREDGQVLPWNIDEKIDMKATSEAFISRMVRRCTYISGEQVLPKASLEYQSYCVLNEINNIKIDGERISVELKQDIYKAVFQKGKKVTKKQLCKYLHTRGIIETEEQVTGVDVSINNALTTYGKFKPIFGEDISKDSVQKMIEDIVFWCTVYGDSKKFLKDRIEEKYGNKLSEEQIKRILGFKFKDWGNLSKKFLELNGADTSTGESISIIRALWNNNLNLMELINSSLYNYKECLAEYQNTMMKTLSEIEAEDLNEYYFSAPVRRMIWQTILVIKELVKVLGCEPERIFVEMTRKPDEHKTRTSSRRNKFEELYKKVKDETTDWMQVIANAEEDGKIRSKKMYLYLTQKGRCMYTGKHIELDDLFDNNLYDIDHIYPRHFVKDDNIDNNLVLVCKEKNAHKSDHYPIEEEIFLSQKKMWLELRKSGFITEEKYNRLMDRNPFSDEQKAGFIARQLVETSQGTKGVANILRQLLPGSKIVYAKASNVSEFRCTRDDIQKSRLVNDFHHAHDAYLNIVVGNVYYVKFTQNPLNFIKKDYDKYKEDYNLSKMFDWDVKRNGEVAWIAQRKDGAAGTITTVKRMLSRNTPLMTRYSFDGKGGLTNETLYSAKKAKGEGYIPFKSSDDKMQDVTKYGGFTSVTGAYFFLVEHTEKKKRIRTIESVPVYLAQKIEQNPDELKKYCEEILGLIDADIRLKKIKIGSLIKRNGYFCYITGKTVNRLIVRNAVNLCLKNEWIKYISKLEKVKEKDAVDKIITKEKNEVLYSELIQKFKHGIFSKRPNPVGDKLEKDSEKFNNLSIKDQCAVLCQVLRMAAILGSECDMTLLGDSPNCGKMLISKKIGDEEIYLINQSVTGLYEKKINLHTV

SEQ ID NO: 3100 - protein, 1358 aa, unidentified
  REGION 1..1358: note = Category: MG91 effectors
  REGION 1..1358: note = Description: MG91-292 effector
  source 1..1358: note = uncultivated organism sequence
MEKEYYLGLDMGTNSVGWAVTDDAYNLIRFKGKDMWGIREFDEANPAVERRTHRTSRRRKQRNAVRMGLIRSYFADEIQKVDSNFYQRLDNSFFHVEDKQDNVKDKNGIFNDKNYKDADYYKQYPTIFHLRKELIEDASQKDVRLVYLAVANMFKHRGHFLLSGIGSESSKQTITDLYNQVSGLITEEYGISLKTDIAGTDFEQVLCSREYSRTRKSEKVCEILEIKNSDKLKKAFVKSMCGLSVKITDIIDDTFTEISDEDKKITFSFVDSDYDEKAGVLEEKLGTDVYDIISKLKEIHDKAQVAEIMKNYQYLSFARVADYEKHKKDLKILKRVVKKYFEPTVYDKLFRSEENGTYSAYVNSFNSEEKSRRNYKERKQEDLYNSIKKLLKSVDNVDDTDIEYIKNEMDKENFLPKQLTFKNGVIPNQIHASELKAILKNAEKYLPFLNEKDESGYTVSERILMLFSFQIPYYVGPVSSNSNGWVKRLEPGQVLPWNIDKKIDLKETSEQFIQRMVRNCTYIAGEKVLPKASLLYENFKVLNEINNLSINGERITVNLKQDLYNTLFLKGKRVTRKQIFNYFHSRGLVEEDSQISGIDIAVNNSLSTYGKFLPLFGEHLKEDKYKKMVDDIVFWCTVYGDSRKFLREQLEEKYSDVLDENQIKRITGMKFKDWGNLSKEFLELSGCCKSTGEVMPLIRAMWETNYNLMELLHSEEFTYSEELEEKQGEIEKVLSEYTIDDLNEEYFSAPVKRMVWQTLLIIKEIEKIMKCPPTRIFVEMTRKDDEKGDNGRKSSRKDQLLALYKKIQSEDKEWKKEMSSRIEDYDKNGALRSKKLYLYFIQKGLDMYTGKPIDLDNLMSANSNYDIDHIYPRHFVKDDNINNNLVLASKPANAEKSDIYPIKDSIYQKMKYTWKVLRDEGLITEEKYKRLTGRNPFTDEQKAGFIARQLVETGQGTKGVADLLTALLPDTKLVYSKAGNVSDFRKKYDIPKSRLINDFHHAHDAYLNIVVGNIYFTKFTSNPLNYIRKECSSKDNKYQYNLGNMYKWDVKRDGKTAWIAAKEGETGTIATVKKMLSRNTPTLTRLTIEGHGGIADATLYSHKKAKQDAYIPLKSSDARMADVTKYGGYSSITTAYLFLVEHEIKGKKIRTLETVPLYLKDRLENSKEKLEEYCRETLGYTNPSVRMKKIKLQSLIKLNGYYMQISGKTNKQFTVRNYVQFCLNSKWVDYIHKLEKYQDKGVIDDAITDEKNVELYNVLCEKHSVGIFTLRPNPVGDKIKKGYDKFVNLTTEEQIKLLIEIIKLTCVGIVSANLTLIGGASISGKMLISKNITDAKECLLINQSVTGLYENRIDLLRV

SEQ ID NO: 3101 - protein, 1352 aa, unidentified
  REGION 1..1352: note = Category: MG91 effectors
  REGION 1..1352: note = Description: MG91-293 effector
  source 1..1352: note = uncultivated organism sequence
MTAFKYYLGLDMGTNSVGWAATDPEYRLLKAKGKDLWGIREFNEASGAVERRTHRISRRRRQREQVRIGILKDYFHDAICEVDPSFFQRLENSKYHEEDKDVEVRYKNNIFNDSNYTDKDYFNEYPTIYHLRNELISSTEKHDVRLVFLALLNMFKHRGHFLNAGLGENNGESNIDNAYFELTELLSELTEYHLSQDIDCKQIEAILSRRDMSRTHKAEELAGVLHVDLKNKPYKELIRGLCGLKFNACVVFPDVQSEEVTKLDICLSESTFDEKSDEIANIIGEDYFEIIMAMKEMFDIGSLASIMKGHNYLSQARVASYTKHKEDLKLLKEVIKKYCGKKEYDKFFNSDADGSYASYVGSYNSKKKERRVGNKRTSEELYKEIKKLLKDAQKEDENVQKILTSIENETFLPKQLTASNGVIQNQVHAREMKKILSNAENYLPFLTKKDETGLSVSERILKLFTFQIPYYIGPTSENSGKNGGNGWVVRREDGQVLPWNIDEKIDMKATSEAFISRMVRRCTYISGEQVLPKASLEYQSYCVLNEINNIKIDGERISVELKQDIYKAVFQKGKKVTKKQLCKYLHTRGIIETEEQVTGVDVSINNALTTYGKFKPIFGEDISKDSVQKMIEDIVFWCTVYGDSKKFLKDRIEEKYGNKLSEEQIKRILGFKFKDWGNLSKKFLELNGADTSTGESISIIRALWNNNLNLMELINSSLYNYKECLAEYQNTMLKTLSEIEAEDLNEYYFSAPVRRMIWQTILVIKELVKVLGCEPERIFVEMTRKPDEHKTRTSSRRNKFEELYKKVKDETTDWMQVIANAEEDGKIRSKKMYLYLTQKGRCMYTGKHIELDDLFDNNLYDIDHIYPRHFVKDDNIDNNLVLVCKEKNAHKSDHYPIEEEIFLSQKKMWLELRKSGFITEEKYNRLMDRNPFSDEQKAGFIARQLVETSQGTKGVANILRQLLPGSKIVYAKASNVSEFRHTRDDIPKSRLVNDFHHAHDAYLNIVVGNVYYVKFTQNPLNFIKKDYDKYKEDYNLSKMFDWDVKRNGEVAWIAQRKDGEAGTITTVKKMLSRNTPLMTRYSFEGKGGLANETLYSAKKAKGEGYIPFKSSDDKMQDVTKYGGFTSVTGAYFFLVEHTEKKKRIRTIESVPVYLAQKIEQNPDELKKYCEEILGLIDADIRLKKIKIGSLIKRNGYFCYITGKTGKQLIVRNAVNLCLKNEWIKYISKLEKVKEIDAVDKIITKEKNEVLYSELIQKFKHGIFSKRPNPVGDKLEKGSEKFSNLSIKEQCAVLCQILQLAAVLGSECDMTLLGESAHCGKMLISKKIGDEEIYLINQSVTGLYEKKINLHTV

SEQ ID NO: 3102 - protein, 1352 aa, unidentified
  REGION 1..1352: note = Category: MG91 effectors
  REGION 1..1352: note = Description: MG91-294 effector
  source 1..1352: note = uncultivated organism sequence
MTAFKYYLGLDMGTNSVGWAATDPEYRLLKAKGKDLWGIREFNEASGAVERRTHRISRRRRQREQVRIGILKDYFHDAICEVDPGFFRRLENSKYHEEDKDVEVRYKNNIFNDSNYTDKDYFNEYPTIYHLRNELISSTEKHDVRLVFLALLNMFKHRGHFLNAGLGENNGESNIDNAYFELTELLSELTEYHLSHDIDCKQIEAILSRRDMSRTHKVEELAGVLHVDLKNKPYKELIRGLCGLKFNACVVFPDVQSEEVTKLDICLSESSFDEKSDEIANIIGEDYFEIIMAMKEMFDIGSLASIMKGHNYLSQARVASYTKHKEDLKLLKEVIKKYCGKKEYDKFFNSDADGSYASYVGSYNSKNKERRVGNKRTSEELYKEIKKLLKDAPKEDENVQKILTSIENETFLPKQLTASNGVIPNQVHAREMKKILSNAENYLPFLTENDETGLSVSERILKLFTFQIPYYVGPTSENSGKNGGNGWVVRREDGQVLPWNIDEKIDMKATSEAFISRMVRRCTYISGEQVLPKASLEYQSYCVLNEINNIKIDGERISVELKQDIYKAVFQKGKKVTKKQLCKYLHTRGIIETEEQVTGVDVSINNALTTYGKFKPIFGEDISKDSVQKMIEDIVFWCTVYGDSKKFLKDRIEEKYGNKLSEEQIKRILGFKFKDWGNLSKKFLELNGADTSTGESISIIRALWNNNLNLMELINSSLYNYKECLAEYQNTMLKTLSEIEAEDLNEYYFSAPVRRMIWQTILVIKELVKVLGCEPERIFVEMTRRPDEHKTRTSSRRNKFEELYKKVKDEATDWMQVIAKAEEDGKIRSKKMYLYLTQKGRCMYTGKHIELDDLFDKNLYDIDHIYPRHFVKDDNIDNNLVLVCKEKNAHKSDHYPIEEEIFLSQKKMWLELRKSGFITEEKYNRLMGRSPFSDEQKAGFIARQLVETSQGTKGVANILRQLLPGSKIVYAKASNVSEFRHTRDDIPKSRLVNDFHHAHDAYLNIVVGNVYYVKFTQNPLNFIKKDYDKYKEDYNLSKMFDWDVKRNGEVAWIAQRKDGEAGTITTVKRMLSRNTPLMTRYSFEGKGGLANETLCSAKKAKGEGYIPFKSSDDKMQDVTKYGGFTKVTGAYFFLVEHTEKKKRIRTIESVPVYLAQKIEQNPDELKKYCEEILGLVDADIRLKKIKIGSLIKRNGYFCYITGKTGNRLSVRNAVNLCLKNEWIKYISKLEKVKEKDAVDEIITKEKNEVLYSELIQKFKHGIFSKRPNPVEDKLEKGSEKFSNLSIKEQCAVLCQILQLAAVLGSECDMTLLGESAHCGKMLISKKIGDEEIYLLNQSVTGLYEKKINLHTV

SEQ ID NO: 3103 - protein, 1353 aa, unidentified
  REGION 1..1353: note = Category: MG91 effectors
  REGION 1..1353: note = Description: MG91-295 effector
  source 1..1353: note = uncultivated organism sequence
MAAYYLGLDMGTSSVGWAVTNEQYELIKKKGKDLWGIREFDEAHTAVDRRMMRVSRRRRQRELARIGLLKEYFQDAIAEVDPNFYARLENSKYHLEDKDVSVRTYNGIFADKDYTDKEYFAEYPTIFHLRKELLESQEPHDVRLVYLALVNMFKHRGHFLNATLSSDSENRSIKDVWNEFAEQVYELLGISFSDEIDYMALQEIMCSTDISRKKKAEELVQLLKIDKKEKQKIALLECVIGLNVSIKTIFGACISDDFDPKMKISFSDAGYEEKIVDIQEVLGDENFELIAGMKALYDAAILNQIMGGNAYLSIARVQEYEKHKSDLKILKSIYRKYATKKDYDDMFRSTEKGSYSAYTNSTNSDKVANAENGGEPVRRGIEGRKKEDLYANIKKKLAEMPEDEDVQYVLNEIEKDHFLPKQLTASNGVIPNQIHLKEMKKILSNAENYLPFLKEKDESGYTTTERILKLFSFQIPYYVGPVTEKSARDGGNGWVIRKEDGVVLPWNINEKIDMKKTSEAFISRMVRRCTYMSGEQVLPKASLEYESFCVLNELNNLKVRGEKLPVEIKQNMYKDLFETGKRVTKNKIIKYLIGQGVLSEGNEDELTGLMDGINGTLSSFAKFRAVFGDAIYEDSCKKMVEQIIFWCTVYGDSKSFLKEQLEEKYAKDLTPEQMKRILGFKFKDWGNLSKEFLELNGCKKDTGEAASLIRMLWETNDNLMELLAKDKYTYQEKLQESQEKSYKILSEMQPEDLEDYYFSAPVKRMVWQTLLVIKEIEKVMGEPPKRLFVEMTRSENKKEGMKNSRAKKFLDLYKKIKDEDKDWKKIIESADEDGRIRSKKMYLYLTQKGRCMYTGRPIDLDQLFNNNLYDIDHIYPRHFVKDDNLENNLVLVEKEKNARKSDTYPLDEEIYKKQLNWWRELHQQNLINDEKFKRLTGRNPFSDEQKAGFIARQLVETSQGTKGVATILKEVFPEETTIVYAKARNVSDFRHDYDLLKSRIVNDFHHAQDAYLNIVVGNVYYVKFTQNPMNFIRENKSYNLGKMFAWDVKRGNETAWIAKPENGSAATIATVRKVMAKNTPLLTRLSFEGGGGIANQTLYSAKKAKEEGYIPLKSSDPKMQDIKKYGGYTSVTTAYFILVEHGTEKKRIRTIESVTLIWKDRIEKNPDELQVYCEEVLGLINPDIRVRKILIQSLIKREGYYMHISGKTGNQIKLRNAVSLCLKTTWTNYIKKLEKGEKTEEITKASNIALYEELMRKHKETIYAKRPNPVGDKLLSGEEKFEKMEVEIQIKVLLEILKLTQIGLPTADLREIGESANTGVMLMSKNITKLQEIKLIHQSVTGIYEQQVDLLTV

SEQ ID NO: 3104 - protein, 1352 aa, unidentified
  REGION 1..1352: note = Category: MG91 effectors
  REGION 1..1352: note = Description: MG91-296 effector
  source 1..1352: note = uncultivated organism sequence
MTAFKYYLGLDMGTNSVGWAATDPEYRLLKAKGKDLWGIREFNEASGAVERRTHRISRRRRQREQVRIGILKDYFHDAICEVDPGFFQRLENSKYHEEDKDVEVRYKNNIFNDSNYTDKDYFNEYPTIYHLRNELISSTEKHDVRLVFLALLNMFKHRGHFLNAGLGENNGESNIDNAYFELTELLSELTEYHLSQDIDCKQIEAILSRRDMSRTHKAEELAGVLHVDLKNKPYKELIRGLCGLKFNACVVFPDVQSEEVTKLDICLSESTFDEKSDEIANIIGEDYFEIIMAMKEMFDIGSLASIMKGHNYLSQARVASYTKHKEDLKLLKEVIKKYCGKKEYDKFFNSDADGSYASYVGSYNSKNKERRVGNKRTSEELYKEIKKLLKDAQKEDENVQKILTSIENETFLPKQLTASNGVIPNQVHAREMKKILSNAENYLPFLTEKDETGLSVSERILKLFTFQIPYYVGPTSENSGKNGGNGWVVRREDGQVLPWNIDEKIDMKATSEAFISRMVRRCTYISGEQVLPKASLEYQSYCVLNEINNIKIDGERISVELKQDIYKAVFQKGKKVTKKQFCKYLHTRGIIETEEQVTGVDVSINNALTTYGKFKPIFGEDISKDSVQKMIEDIVFWCTVYGDSKKFLKDRIEEKYGNKLSEEQIKRILGFKFKDWGNLSKKFLELNGADTSTGESISIIRALWNNNLNLMELINSSLYNYKECLAEYQNTMLKTLSEIEAEDLNEYYFSAPVRRMIWQTILVIKELVKVLGCEPERIFVEMTRKPDEHKTRTSSRRNKFEELYKKVKDETTDWMQVIANAEEDGKIRSKKMYLYLTQKGRCMYTGKHIELDDLFDNNLYDIDHIYPRHFVKDDNIDNNLVLVCKEKNAHKSDHYPIEEEIFLSQKKMWLELRKSGFITEEKYNRLMDRNPFSDEQKAGFIARQLVETSQGTKGVANILRQLLPGSKIVYAKASNVSEFRCTRDDIQKSRLVNDFHHAHDAYLNIVVGNVYYVKFTQNPLNFIKKDYDKYKEDYNLSKMFDWDVKRNGEVAWIAQRKDGAAGTITTVKRMLSRNTPLMTRYSFDGKGGLTNETLYSAKKAKGEGYIPFKSSDDKMQDVTKYGGFTSVTGAYFFLVEHTEKKKRIRTIESVPVYLAQKIEQNPDELKKYCEEILGLIDADIRLKKIKIGSLIKRNGYFCYITGKTVNRLIVRNAVNLCLKNEWIKYISKLEKVKEKDAVDKIITKEKNEVLYSELIQKFKHGIFSKRPNPVGDKLEKDSEKFNNLSIKDQCAVLCQVLRMAAILGSECDMTLLGDSPNCGKMLISKKIGDEEIYLINQSVTGLYEKKINLHTV

SEQ ID NO: 3105 - protein, 1274 aa, unidentified
  REGION 1..1274: note = Category: MG91 effectors
  REGION 1..1274: note = Description: MG91-297 effector
  source 1..1274: note = uncultivated organism sequence
MEKEYYLGLDMGTNSVGWAVTDDAYNLIRFKGKDMWGIREFDEANPAVERRTHRTSRRREQRNAVRMGLIRSYFADEIQKVDSNFYQRLDNSFFHVEDKQDNVKDKNGIFNDKNYKDADYYKQYPTIFHLRKELIEDASQKDVRLVYLAVANMFKHRGHFLLSGIGSESSKQTITDLYNQVSGLITEEYGISLKTDIAGTDFEQVLCSREYSRTRKSEKVCEILEIKNSDKLKKAFVKSMCGLSVKITDIIDDTFTEISDEDKKITFSFVDSDYDEKAGVLEEKLGTDVYDIISKLKEIHDKAQVAEIMKNYQYLSFARVADYEKHKKDLKILKRVVKKYFEPTVYDKLFRSEENGTYSAYVNSFNSEEKSRRNYKERKQEDLYNSIKKLLKSVDNVDDTDIEYIKNEMDKENFLPKQLTFKNGVIPNQIHASELKAILKNAEKYLPFLNEKDESGYTVSERILMLFSFQIPYYVGPVSSNSNGWVKRLEPGQVLPWNIDKKIDLKETSEQFIQRMVRNCTYIAGEKVLPKASLLYENFKVLNEINNLSINGERITVNLKQDLYNTLFLKGKRVTRKQIFNYFHSRGLVEEDSQISGIDIAVNNSLSTYGKFLPLFGEHLKEDKYKKMVDDIVFWCTVYGDSRKFLREQLEEKYSDVLDENQIKRITGMKFKDWGNLSKEFLELSGCCKSTGEVMPLIRAMWETNYNLMELLHSEEFTYSEELEEKQGKIEKVLSEYTIDDLNEEYFSAPVKRMVWQTLLIIKEIEKIMKCPPTRIFVEMTRKDDEKGDNGRKSSRKDQLLALYKKIQSEDKEWKKEMSSRIEDYDKNGALRSKKLYLYFIQKGLDMYTGKPIDLDNLMSANSNYDIDHIYPRHFVKDDNINNNLVLASKPANAEKSDIYPIKDSIYQKMKYTWKVLRDEGLITEEKYKRLTGRNPFTDEQKAGFIARQLVETGQGTKGVADLLTALLPDTKLVYSKAGNVSDFRKRYDIPKSRLINDFHHAHDAYLNIVVGNIYFTKFTSNPLNYIRKECSSKDNKYQYNLGNMYKWDVKRDGKTAWVAPEEGETGTLATVKKMLSRNTPILTRLTIEGHGGIADATLYSHKKAKQDTYIPLKSSDARMADVTKYGGYSSVTTAYLFLVEHEIKGKKIRTLETVPLYLKDRLENSKEKLEEYCRETLGYTNPSVRMKKIKLQSLIKLNGYYMQISGKTNKQFTVRNYVQFCLNSKWVDYIHKLEKYQDKGVIDDAITDEKMWNCIMFYAKNIVWAYLHYVRIR

SEQ ID NO: 3106 - protein, 1352 aa, unidentified
  REGION 1..1352: note = Category: MG91 effectors
  REGION 1..1352: note = Description: MG91-298 effector
  source 1..1352: note = uncultivated organism sequence
MTAFKYYLGLDMGTNSVGWAATDPEYRLLKAKGKDLWGIREFNEASGAVERRTHRISRRRRQREQVRIGILKDYFHDAICEVDPGFFQRLENSKYHEEDKDVEVRYKNNIFNDSNYTDKDYFNEYPTIYHLRNELISSTEKHDVRLVFLALLNMFKHRGHFLNAGLGENNGESNIDNAYFELTELLSELTEYHLSQDIDCKQIEAILSRRDMSRTHKAEELAGVLHVDLKNKPYKELIRGLCGLKFNACVVFPDVQSEEVTKLDICLSESTFDEKSDEIANIIGEDYFEIIMAMKEMFDIGSLASIMKGHNYLSQARVASYTKHKEDLKLLKEVIKKYCGKKEYDKFFNSDADGSYASYVGSYNSKNKERRVGNKRTSEELYKEIKKLLKDAQKEDENVQKILTSIENETFLPKQLTASNGVIPNQVHAREMKKILSNAENYLPFLTEKDETGLSVSERILKLFTFQIPYYVGPTSENSGKNGGNGWVVRREDGQVLPWNIDEKIDMKATSEAFISRMVRRCTYISGEQVLPKASLEYQSYCVLNEINNIKIDGERISVELKQDIYKAVFQKGKKVTKKQLCKYLHTRGIIETEEQVTGVDVSINNALTTYGKFKPIFGEDISKDSVQKMIEDIVFWCTVYGDSKKFLKDRIEEKYGNKLSEEQIKRILGFKFKDWGNLSKKFLELNGADTSTGESISIIRALWNNNLNLMELINSSLYNYKECLAEYQNTMLKTLSEIEAEDLNEYYFSAPVRRMIWQTILVIKELVKVLGCEPERIFVEMTRKPDEHKTRTSSRRNKFEELYKKVKDETTDWMQVIANAEEDGKIRSKKMYLYLTQKGRCMYTGKHIELDDLFDNNLYDIDHIYPRHFVKDDNIDNNLVLVCKEKNAHKSDHYPIEEEIFLSQKKMWLELRKSGFITEEKYNRLMDRNPFSDEQKAGFIARQLVETSQGTKGVANILRQLLPGSKIVYAKASNVSEFRCTRDDIQKSRLVNDFHHAHDAYLNIVVGNVYYVKFTQNPLNFIKKDYDKYKEDYNLSKMFDWDVKRNGEVAWIAQRKDGAAGTITTVKRMLSRNTPLMTRYSFDGKGGLTNETLYSAKKAKGEGYIPFKSSDDKMQDVTKYGGFTSVTGAYFFLVEHTEKKKRIRTIESVPVYLAQKIEQNPDELKKYCEEILGLIDADIRLKKIKIGSLIKRNGYFCYITGKTVNRLIVRNAVNLCLKNEWIKYISKLEKIKEKDAVDKIITKEKNEVLYSELIQKFKHGIFSKRPNPVGDKLEKDSEKFNNLSIKDQCAVLCQVLRMAAILGSECDMTLLGDSPNCGKMLISKKIGDEEIYLINQSVTGLYEKKINLHTV

SEQ ID NO: 3107 - protein, 1352 aa, unidentified
  REGION 1..1352: note = Category: MG91 effectors
  REGION 1..1352: note = Description: MG91-299 effector
  source 1..1352: note = uncultivated organism sequence
MTAFKYYLGLDMGTNSVGWAATDPEYRLLKAKGKDLWGIREFNEASGAVERRTHRISRRRRQREQVRIGILKDYFHDAICEVDPGFFQRLENSKYHEEDKDVEVRYKNNIFNDSNYTDKDYFNEYPTIYHLRNELISSTEKHDVRLVFLALLNMFKHRGHFLNAGLGENNGESNIDNAYFELTELLSELTEYHLSQDIDCKQIEAFLSRRDMSRTHKAEELAGVLHVDLKNKPYKELIRGLCGLKFNACVVFPDVQSEEVTKLDICLSESTFDEKSDEIANIIGEDYFEIIMAMKEMFDIGSLASIMKGHNYLSQARVASYTKHKEDLKLLKEVIKKYCGKKEYDKFFNSDADGSYASYVGSYNSKNKERRVGNKRTSEELYKEIKKLLKDAQKEDENVQKILTSIENETFLPKQLTASNGVIPNQVHAREMKKILSNAENYLPFLTEKDETGLSVSERILKLFTFQIPYYVGPTSENSGKNGGNGWVVRREDGQVLPWNIDEKIDMKATSEAFISRMVRRCTYISGEQVLPKASLEYQSYCVLNEINNIKIDGERISVELKQDIYKAVFQKGKKVTKKQLCKYLHTRGIIETEEQVTGVDVSINNALTTYGKFKPIFGEDISKDSVQKMIEDIVFWCTVYGDSKKFLKDRIEEKYGNKLSEEQIKRILGFKFKDWGNLSKKFLELNGADTSTGESISIIRALWNNNLNLMELINSSLYNYKECLAEYQNTMLKTLSEIEAEDLNEYYFSAPVRRMIWQTILVIKELVKVLGCEPERIFVEMTRKPDEHKTRTSSRRNKFEELYKKVKDETTDWMQVIANAEEDGKIRSKKMYLYLTQKGRCMYTGKHIELDDLFDNNLYDIDHIYPRHFVKDDNIDNNLVLVCKEKNAHKSDHYPIEEEIFLSQKKMWLELRKSGFITEEKYNRLMDRNPFSDEQKAGFIARQLVETSQGTKGVANILRQLLPGSKIVYAKASNVSEFRCTRDDIQKSRLVNDFHHAHDAYLNIVVGNVYYVKFTQNPLNFIKKDYDKYKEDYNLSKMFDWDVKRNGEVAWIAQRKDGAAGTITTVKRMLSRNTPLMTRYSFDGKGGLTNETLYSAKKAKGEGYIPFKSSDDKMQDVTKYGGFTSVTGAYFFLVEHTEKKKRIRTIESVPVYLAQKIEQNPDELKKYCEEILGLIDADIRLKKIKIGSLIKRNGYFCYITGKTVNRLIVRNAVNLCLKNEWIKYISKLEKVKEKDAVDKIITKEKNEVLYSELIQKFKHGIFSKRPNPVGDKLEKDSEKFNNLSIKDQCAVLCQVLRMAAILGSECDMTLLGDSPNCGKMLISKKIGDEEIYLINQSVTGLYEKKINLHTV

SEQ ID NO: 3108 - protein, 1352 aa, unidentified
  REGION 1..1352: note = Category: MG91 effectors
  REGION 1..1352: note = Description: MG91-300 effector
  source 1..1352: note = uncultivated organism sequence
MTAFKYYLGLDMGTNSVGWAATDPGYRLLKAKGKDLWGIREFNEASGAVERRTHRISRRRRQREQVRIGILKDYFHDAICEVDPSFFQRLENSKYHEEDKDVEVRYKNNIFNDSNYTDKDYFNEYPTIYHLRNELISSTEKHDVRLVFLALLNMFKHRGHFLNAGLGENNGESNIDNAYFELTELLSELTEYHLSQDIDCKQIEAILSRRDMSRTHKAEELAGVLHVDLKNKPYKELIRGLCGLKFNACVVFPDVQSEEVTKLDICLSESTFDEKSDEIANIIGEDYFEIIMAMKEMFDIGSLASIMKGHNYLSQARVASYTKHKEDLKLLKEVIKKYCGKKEYDKFFNSDADGSYASYVGSYNSKNKERRVGNKRTSEELYKEIKKLLKDAQKEDENVQKILTSIENETFLPKQLTASNGVIPNQVHAREMKKILSNAENYLPFLTEKDETGLSVSERILKLFTFQIPYYVGPTSENSGKNGGNGWVVRREDGQVLPWNIDEKIDMKATSEAFISRMVRRCTYISGEQVLPKASLEYQSYCVLNEINNIKIDGERISVELKQDIYKAVFQKGKKVTKKQLCKYLHTRGIIETEEQVTGVDVSINNALTTYGKFKPIFGEDISKDSVQKMIEDIVFWCTVYGDSKKFLKDRIEEKYGNKLSEEQIKRILGFKFKDWGNLSKKFLELNGADTSTGESISIIRALWNNNLNLMELINSSLYNYKECLAEYQNTMLKTLSEIEAEDLNEYYFSAPVRRMIWQTILVIKELVKVLGCEPERIFVEMTRKPDEHKTRTSSRRNKFEELYKKVKDETTDWMQVIANAEEDGKIRSKKMYLYLTQKGRCMYTGKHIELDDLFDNNLYDIDHIYPRHFVKDDNIDNNLVLVCKEKNAHKSDHYPIEEEIFLSQKKMWLELRKSGFITEEKYNRLMDRNPFSDEQKAGFIARQLVETSQGTKGVANILRQLLPGSKIVYAKASNVSEFRCTRDDIQKSRLVNDFHHAHDAYLNIVVGNVYYVKFTQNPLNFIKKDYDKYKEDYNLSKMFDWDVKRNGEVAWIAQRKDGAAGTITTVKRMLSRNTPLMTRYSFDGKGGLTNETLYSAKKAKGEGYIPFKSSDDKMQDVTKYGGFTSVTGAYFFLVEHTEKKKRIRTIESVPVYLAQKIEQNPDELKKYCEEILELIDADIRLKKIKIGSLIKRNGYFCYITGKTGNRLIVRNAVNLCLKNEWIKYISKLEKVKEKDAVDKIITKEKNEVLYSELIQKFKHGIFSKRPNPVGDKLEKDSEKFNNLSIKDQCAVLCQVLRMAAILGSECDMTLLGDSPNCGKMLISKKIGDEEIYLINQSVTGLYEKKINLHTV

SEQ ID NO: 3109 - protein, 1342 aa, unidentified
  REGION 1..1342: note = Category: MG91 effectors
  REGION 1..1342: note = Description: MG91-301 effector
  source 1..1342: note = uncultivated organism sequence
MRYFMGLDMGTSSVGWAVTDEHYQLLRRKGKDMWGIREFEEAATAVERRTHRVSRRRRQRQVARIGLLQEYFHDAIHQVDPNFYQRLKNSKYHEEDKDEIVRGSNGIFNDAEYTDKEYFKEFPTIFHLRQELIKSKEPHDVRLVYLALLNMFKHRGHFLNATLSADGESRKIKDIYTDFVDKAAEQLGISFATDIKYEELENYLSSNDLSRKRKGELIAELLHVTRKDKQQYALIECMLGLDKSVKLMFGDTLPEDFDKTIKVNFSDIAFEEKATEISEAIGEEKYDLILIMKEIYDAAILNRIMNGYTYLSDARVAEYEKHKSDLACLKHYIKEYGTQHQFDFLFRGTEKGSYSAYVHSVNSHEKQRRNMDGNKKEDLYSTLKKILKDMPENEEKTHIMMQIELDNFLPKQLTASNGVIPNQIHLKEMKKILANAENYLPFLKEKDESGYTVSERIQKLFAFQIPYYIGPTTEKSAEFGGNGWVVRKEEGKVLPWNIDQKIDMKKTSEEFISRMVRRCTYMNDEQVLPKESLEYESFCVLNELNNIKVYGEKLPVDIKQDIYRTLCEKGKRITKKSLMKYLVGRGVIKAEDEEQLTGLMDGLNNTLKSFAKFKAIFGDAIYEDSCKKMVEQIIFWCTVYGDSKHFLKEQLLEKYGEVLTDAQIKRILGIKFRDWGNLSKKFLELQGCCKETGEVNSLIRMLWETNDNLMELLARDSYTFKEELENMQESTYKVLAELQPEDLDHMYFSAPVKRMIWQTILIIKEVTKVIGCQPERLFIEMTREHGQKNDIKDSRAKKFYELYSKIKDEDKDWRKVIEDADKDGRIRSKKMYLYLTQMGRCMYTGRPIELDQLFNNNLYDIDHIYPRHYVKDDNLENNMVLVEKQSNAHKSDVYPLESGIYEKQVNWWRELHRKNLINDEKLKRLTGRNPFTDEQKAGFIARQLVETSQGTKGVATILQEALPDTTLVYAKAKNVSDFRNDYDLLKSRIVNDFHHAHDAYLNIVIGNVYYVKFTKNPINFIREHGTYNLGKMYAKDVKRGDEIAWVAQSGNGQTATMETIRRTMARNTPLLTRMSYEVTGGLANQTLYSASKAKEGTYISLKSSDERMQDVTKYGGFTSVSTAYFMLVEHDGKKGKRIRTIESVPIMWKERIEKNPVELERYCLEVLKLSNPDIRVRKILIQSLIKRNGYFMYITGKTNKQLSVRNKVSLCLTQNWVNYIKNLENDNDDNITKKENLELYDILSDKHNNTIYRQRPNPVGSKLHKCRDRFINLEMNEQKVVLLEILKLTQIASTSANLELLGESKQTGVMFIGKDITALDEILLINQSVTGLYEQRVNLLTV

SEQ ID NO: 3110 - protein, 1353 aa, unidentified
  REGION 1..1353: note = Category: MG91 effectors
  REGION 1..1353: note = Description: MG91-302 effector
  source 1..1353: note = uncultivated organism sequence
MAAYYLGLDMGTSSVGWAVTNEQYELIKKKGKDLWGIREFDEAHTAVDRRMMRVSRRRRQRELARIGFLKEYFQDAIAEVDPNFYARLENSKYHLEDKDVSVRTYNGIFADKDYTDKEYFAEYPTIFHLRKELLESQEPHDVRLVYLALVNMFKHRGHFLNATLSSDSENRSIKDVWNEFAEQVYELLGISFSDEIDYMALQEIMCSTDISRKKKAEELVQLLKIDKKEKQKIALLECVIGLNVSIKTIFGACISDDFDPKMKISFSDAGYEEKIVDIQEVLGDENFELIAGMKALYDAAILNQIMGGNAYLSIARVQEYEKHKSDLKILKSIYRKYATKKDYDDMFRSTEKGSYSAYTNSTNSDKVANAENGGEPVRRGIEGRKKEDLYANIKKKLAEMPEDEDVQYVLNEIEKDHFLPKQLTASNGVIPNQIHLKEMKKILSNAENYLPFLKEKDESGYTTTERILKLFSFQIPYYVGPVTEKSARDGGNGWVVRKEDGVVLPWNINEKIDMKKTSEAFISRMVRRCTYMSGEQVLPKASLEYESFCVLNELNNLKVRGEKLPIEIKQNMYKDLFETGKRVTKNKIVKYLIGQGVLCEGNEDELTGLMDGINGTLSSFAKFRAVFGDAIYEDSCKKMVEQIIFWCTVYGDSKSFLKEQLEEKYAKDLTPEQMKRILGFKFKDWGNLSKEFLELNGCKKDTGEAASLIRMMWETNDNLMELLAKDKYTYQEKLQESQEKSYKILSEMQLEDLEDYYFSAPVKRMVWQTLLVIKEIEKVMGEPPKRLFVEMTRSEDKKKEMKDSRAKKFLELYKKIKDEDKDWKKIIESADEDGRIRSKKMYLYLTQKGRCMYTGRPIDLDQLFNNNLYDIDHIYPRHFVKDDNLENNLVLVEKEKNARKSDTYPLDEEIYKKQLNWWRELHQQNLINDEKFKRLTGRNPFSDEQKAGFIARQLVETSQGTKGVATILKEVFSEETTIVYAKARNVSDFRHDYDLLKSRIVNDFHHAQDAYLNIVVGNVYYVKFTQNPMNFIRENKSYNLGKMFAWDVKRGNETAWIAKPENGSAATIATVRKVMAKNTPLLTRLSFEGSGGIANQTLYSAKKAKEEGYIPLKSSDPKMQDIKKYGGYTSVTTAYFILVEHGTEKKRIRTIESVTLIWKDRIEKNPDELQVYCEEVLGLINPDIRVRKILIQSLIKREGYYMHISGKTGNQIKLRNAVSLCLKTTWTNYIKKLEKGEKTEEITKASNIALYEELMRKHKETIYAKRPNPVGDKLLSGEEKFEKMEVEIQIKVLLEILKLTQIGLPTADLREIGESANTGVMLMSKNITKLQEIKLIHQSVTGIYEQQVDLLTV

SEQ ID NO: 3111 - protein, 1352 aa, unidentified
  REGION 1..1352: note = Category: MG91 effectors
  REGION 1..1352: note = Description: MG91-303 effector
  source 1..1352: note = uncultivated organism sequence
MQEKPYYLGLDMGTNSVGWAVTDQHYNLLKAKGKDLLGIREFIEADTSVERRTHRISRRRRQREQARIGLLNDYFHDAIIAIDPSFFQRLENSKYHLEDKDQNVRYKYNIFNDPDYTDADYYTQYPTIYHLRKELLENPKPHDVRLVYLALLNMFKHRGHFLNSGISDGNNERSLKDAYINFAISVSELTEDYFNQDVDYSTIEGILSSRDLNRTKKAEELSTVLGIDFKNKKYKEYLRAICGLKINAYTLFSDQLPDDTTKIDLCVSDASFDEKSEELVSLIGEDLFQIILNIKEIYDIGSLAGILKGYTYLSQARVAAYDKHKHDLKLLKSSIKKYCTKEEYNNFFNSDADGSYASYIGSFNSGNKERRVGSKRTSEDLYKEIKKLLKGANKSDPAINEIFTSIETESFLPKQLTASNGIIPNQVHSKEMARILTNAENYLPFLKETDENNLSISNRILQLYKFQIPYYIGPVTEKSQRDGGNGWVIRKDNGRVFPWNIEEKIDVKATSEAFISRMVRRCTYMNGKQVLPKASLEYESFRVLNEINNLRIDGERIPVTLKQDIYTDLFQKGKKVTKKQLCNYLATRGLIESSEQVTGIDIAINNSLSTYGKFKAIFGEDIKLDHIQHMIEDIVFWCTVYGDSKQFLKEQIDDKYKGKLSPEQMKRILGFKFKDWGNLSKEFFELKGADKSTGEAVSIIRALWENNLNLMELINSSEFDFKEQLADYEANSLKTLSDFEPEDLNDYYFSAPVRRMIWQTTLIIKELVHVLGKEPARIFIEMTREKDASRGRTLSRKKKFEDLYKNVKDENTDWAKVIEHADESGTIRSKKMYLYLTQKGRCMYTGNHIELSDLFNDNLYDIDHIYPRHFVKDDNIDNNLVLVTKEKNAHKSDNYPLEAEIFNKQRNMWTQLRKEGFISEEKYNRLMGRNAFTDEQKAGFIARQLVETSQGTKGVAELFHQLLPNSKIVYAKAGNVSDFRRNRELPKSRLVNDFHHAHDAYLNIVVGNVYYVKFTQNPINYIKNSYNKDMNKNNYNLSRMFDWDVKRGDEVAWIAQKQDGAAGTISTVKKMLSKNTPLMTRLSYEGKGALANETLYSAEKAKGEGYIPFKSSDTKIQDVTKYGGFTSVTGAYFFLVEHDEKKKRIRTIESVPLYLADKIDKDSSELERYCDKLGLVNYDVRVRKIKIGSLIKYNGYFCYITGKTGYRLIVRNATNLCLTSNWRKYIKKIEKYKETTIIDNVITAEENIKLYNELLNKFTVGIFGRRPNPIGEKMDSARDKFASLSIENQCLALYQILQLTAILGNESDLQLIGASTHAGKMLISKKIGTDEIYLINQSPTGLFETKIDLQTI

SEQ ID NO: 3112 - protein, 1342 aa, unidentified
  REGION 1..1342: note = Category: MG91 effectors
  REGION 1..1342: note = Description: MG91-304 effector
  source 1..1342: note = uncultivated organism sequence
MRYFMGLDMGTSSVGWAVTDEHYQLLRRKGKDMWGIREFEEAATAVERRTHRVSRRRRQRQVARIGLLQEYFHDAIHQVDPNFYQRLKNSKYHEEDKDEIVRESNGIFNDAEYTDKEYFKEFPTIFHLRQELIKSKEPHDVRLVYLALLNMFKHRGHFLNATLSADGESRKIKDIYTDFVDKAAEQLGVSFATDIRYEELENYLSSNDLSRKRKGELIAELLHVTRKDKQQYALIECMLGLDKSVKLMFGDTLPENFDKTIKVNFSDIAFEEKATEISEAIGEEKYDLILIMKEIYDAAILNRIMNGYTYLSDARVAEYEKHKSDLAYLKHYIKEYGTQQQFDFLFRGTEKGSYSAYVHSVNSHEKQRRNMAGNKKEDLYSALKKMLKDMPENEEKTYIMMQIELDNFLPKQLTASNGVIPNQIHLKEMKKILANAENYLSFLKEKDESGYTVSERIQKLFAFQIPYYIGPTTEKSAEFGGNGWVVRKEEGKVLPWNIDQKIDMKKTSEKFISRMVRRCTYVNDEQVLPKESLEYESFCVLNELNNIKVYGEKLPVDIKQDIYRTLCEKGKRITKKSLMKYLVGRGVIKAEDEEQLTGLMDGLNNTLKSFAKFKTIFGDAIYEDSCKKMVEQIIFWCTVYGDSKHFLKEQLLEKYGEVLTDAQIKRILGIKFRDWGNLSKKFLELQGCCKETGEVNSLIRMLWETNDNLMELLARDSYTFKEELEKMQESTYKVLTELQPEDLDHMYFSAPVKRMIWQTILIIKEVTKVIGCQPERLFIEMTREHGQKNDIKDSRAKKFYELYSKIKDEDKDWRKVIEDADKDGRIRSKKMYLYLTQMGRCMYTGRPIELDQLFNNNLYDIDHIYPRHYVKDDNLENNMVLVEKQSNAHKSDVYPLESGIYEKQVNWWRELHRKNLINDEKLKRLTGRNPFTDEQKAGFIARQLVETSQGTKGVATILQEALPDTTLVYAKAKNVSDFRNDYDLLKSRIVNDFHHAHDAYLNIVIGNVYYVKFTKNPINFIREHGTYNLGKMYAKDVKRGDEIAWVAQSGNGQTATMETIRRTMARNTPLLTRMSYEVTGGLANQTLYSANTAKEGIYIPLKSSDEKMHDITKYGGFTSVKGAYFILVEHDDKKGKRIRTIESVPIMWKGRIEKNPAELERYCVEVLKLHNPEIKIRKILYKSLIRENGYYMYISSNEEGRLCMMNAVSLCLKQDWINYIHKLEKLNFENISREKNIKLYQILCDKHKNTIYINRPNSLGKLFDECKENFFDLTLNDQVTVLLEMLKTTQISLATANFSILNKGKNIGKMRMNKKISNEKDILLINQSVTGLYEQKVNLLTV

SEQ ID NO: 3113 - protein, 1245 aa, unidentified
  REGION 1..1245: note = Category: MG91 effectors
  REGION 1..1245: note = Description: MG91-305 effector
  source 1..1245: note = uncultivated organism sequence
MTAFKYYLGLDMGTNSVGWAATDPEYRLLKAKGKDLWGIREFNEASGAVERRTHRISRRRRQREQVRIGILKDYFHDAICEVDPSFFRRLENSKYHEEDKDVEVRYKNNIFNDGNYTDKDYFNEYPTIYHLRNELISSTEKHDVRLVFLALLNMFKHRGHFLNAGLGENNGESNIDNAYFELTELLSELTEYHLSQDIDCKQIEAILSRRDMSRTHKAEELAGVLHVDLKNKPYKELIRGLCGLKFNACVVFPDVQSEEVTKLDICLSESTFDEKSDEIANIIGEDYFEIIMAMKEMFDIGSLASIMKGHNYLSQARVASYTKHKEDLKLLKEVIKKYCGKKEYDKFFNSDADGSYASYVGSYNSKNKERRVGNKRTSEELYKEIKKLLKDAQKEDENVQKILTSIENETFLPKQLTASNGVIPNQVHAREMKKILSNAENYLPFLTEKDETGLSVSERILKLFTFQIPYYVGPTSENSGKNGGNGWVVRREDGQVLPWNIDEKIDMKATSEAFISRMVRRCTYISGEQVLPKASLEYQSYCVLNEINNIKIDGERISVELKQDIYKAVFQKGKKVTKKQLCKYLYTRGIIETEEQVTGVDVSINSALTTYGKFKPIFGEDISKDSVQKMIEDIVFWCTVYGDSRKFLKARIEEKYGNKLSEEQIKRILGFKFKDWGNLSKKFLELNGADTSTGESISIIRALWNNNLNLMELINSSLYNYKECLAEYQNTMLKTLSEIEAEDLNEYYFSAPVRRMIWQTILVIKELVKVLGCEPERIFVEMTRKPDEHKTRTSSRRNKFEELYKKVKDETTDWMQVIANAEEDGKIRSKKMYLYLTQKGRCMYTGKHIELDDLFDNNLYDIDHIYPRHFVKDDNIDNNLVLVCKEKNAHKSDHYPIEEEIFLSQKKMWLELRKSGFITEEKYNRLMDRNPFSDEQKAGFIARQLVETSQGTKGVANILRQLLPGSKIVYAKASNVSEFRHTRDDIPKSRLVNDFHHAHDAYLNIVVGNVYYVKFTQNPLNFIKKDYDNYKEDYNLSKMFDWDVKRNGEVAWIAQRKDGEAGTITTVKKMLSRNTPLMTRYSFEGKGGLANETLYSAKKAKGEGYIPFKSSDDKMQDVTKYGGFTKVAGAYFFLVEHTEKKKRIRTIESVPVYLTRKIEQKPGELKKYCDEILGLVDADIRLKKIKIGSLIKRNGYFCYITGKTGNQLSVRNAVNLCLKNEWIKYISKLEKVKEKDTIDKIITKE

SEQ ID NO: 3114 - protein, 1352 aa, unidentified
  REGION 1..1352: note = Category: MG91 effectors
  REGION 1..1352: note = Description: MG91-306 effector
  source 1..1352: note = uncultivated organism sequence
MQEKPYYLGLDMGTNSVGWAVTDQHYNLLKAKGKDLWGIREFIEADTSVERRTHRISRRRRQREQARIGLLNDYFHDAIIAIDPSFFQRLENSKYHLEDKDQNVRYKYNIFNDPDYTDADYYTQYPTIYHLRKELLENPKPHDVRLVYLALLNMFKHRGHFLNSGISDGNNERSLKDAYINFAISVSELTEDYFNQDVDYSTIEGILSSRDLNRTKKAEELSTVLGIDFKNKKYKEYLRAICGLKINAYTLFSDQLPDDTTKIDLCVSDASFDEKSEELVSLIGEDLFQIILNIKEIYDIGSLAGILKGYTYLSQARVAAYDKHKHDLKLLKSSIKKYCTKEEYNNFFNSDADGSYASYIGSFNSGNKERRVGSKRTSEDLYKEIKKLLKGANKSDPAINEIFTSIETESFLPKQLTASNGIIPNQVHSKEMARILTNAENYLPFLKETDENNLSISNRILQLYKFQIPYYIGPVTEKSQRDGGNGWVIRKDNGRVFPWNIEEKIDVKATSEAFISRMVRRCTYMNGKQVLPKASLEYESFRVLNEINNLRIDGERIPVTLKQDIYTDLFQKGKKVTKKQLCNYLATRGLIESSEQVTGIDIAINNSLSTYGKFKAIFGEDIKLDHIQHMIEDIVFWCTVYGDSKQFLKEQIEDKYKGKLSPEQMKRILGFKFKDWGNLSKEFFELKGADKSTGEAVSIIRALWENNLNLMELINSSEFDFKEQLADYEANSLKTLSDFEPEDLNDYYFSAPVRRMIWQTTLIIKELVHVLGKEPARIFIEMTREKDASRGRTLSRKKKFEDLYKNVKDENTDWAKVIEHADESGTIRSKKMYLYLTQKGRCMYTGNHIELSDLFNDNLYDIDHIYPRHFVKDDNIDNNLVLVTKEKNAHKSDNYPLEAEIFNKQRNMWTQLRKEGFISEEKYNRLMGRNAFTDEQKAGFIARQLVETSQGTKGVAELFHQLLPNSKIVYAKAGNVSDFRRNRELPKSRLVNDFHHAHDAYLNIVVGNVYYVKFTQNPINYIKNSYNKDMNKNNYNLSRMFDWDVKRGDEVAWIAQKQDGAAGTISTVKKMLSKNTPLMTRLSYEGKGALANETLYSAEKAKGEGYIPFKSSDTKIQDVTKYGGFTSVTGAYFFLVEHDEKKKRIRTIESVPLYLADKIDKDSSELERYCDKLGLVNYDVRVRKIKIGSLIKYNGYFCYITGKTGYRLIVRNATNLCLASNWRKYIKKIEKYKETTIIDNVITAEENIKLYNELLNKFTVGIFGRRPNPIGEKMDSARDKFASLSIENQCLALYQILQLTAILGNESDLQLIGASTHAGKMLISKKIGTDEIYLINQSPTGLFETKIDLQTI

SEQ ID NO: 3115 - protein, 1342 aa, unidentified
  REGION 1..1342: note = Category: MG91 effectors
  REGION 1..1342: note = Description: MG91-307 effector
  source 1..1342: note = uncultivated organism sequence
MRYFMGLDMGTSSVGWAVTDEHYQLLRRKGKDMWGIREFEEAATAVERRTHRVSRRRRQRQVARIGLLQEYFHDAIHQVDPNFYQRLKNSKYHEEDKDEIVRESNGIFNDAEYTDKEYFKEFPTIFHLRQELIKSKEPHDVRLVYLALLNMFKHRGHFLNATLSADGESRKIKDIYTDFVDKAAEQLGVSFATDIRYEELENYLSSNDLSRKRKGELIAELLHVTRKDKQQYALIECMLGLDKSVKLMFGDTLPEDFDKTIKVNFSDIAFEEKATEISEAIGEEKYDLILIMKEIYDAAILNRIMNGYTYLSDARVAEYEKHKSDLACLKHYIKEYGTQHQFDFLFRGTEKGSYSAYVHSVNSHEKQRRNMDGNKKEDLYSTLKKMLKDMPENEEKTYIMMQIELDNFLPKQLTASNGVIPNQIHLKEMKKILANAENYLPFLKEKDESGYTVSERIQKLFAFQIPYYIGPTTEKSAEFGGNGWVVRKEEGKVLPWNIDQKIDMKKTSEKFISRMVRRCTYMNDEQVLPKESLEYESFCVLNELNNIKVYGEKLPVDIKQDIYRTLCEKGKRITKKSLMQYLVGRGVIKAEDEEQLTGLMDGLNNTLKSFAKFKAIFGDAIYEDSCKKMVEQIIFWCTVYGDSKHFLKEQLLEKYGEVLTDAQIKRILGIKFRDWGNLSKKFLELQGCSKETGEVNSLIRMLWETNDNLMELLAQDSYTFKEELENMQESTYKVLAELQPEDLDHMYFSAPVKRMIWQTILIIKEVTKVIGCQPERLFIEMTREHGQKNDIKDSRAKKFYELYSKIKDEDKDWRKVIEDADKDGRIRSKKMYLYLTQMGRCMYTGRPIELDQLFNNNLYDIDHIYPRHYVKDDNLENNMVLVEKQSNAHKSDVYPLESGIYEKQVNWWRELHRKNLINDEKLKRLTGRNPFTDEQKAGFIARQLVETSQGTKGVATILQEALPDTTLVYAKARNVSEFRSDNDLLKSRIVNDFHHAHDAYLNIVIGNVYYVKFTKNPINFIREHGTYNLGKMFAKDVKRGDDIGWVAQSGNGQTATMETIKRTMARNTPLLTRMSYEVTGGLANQTLYSASKAKEGTYIPLKSSDERMQDVTKYGGFTSVSTAYFMLVEHDGKKGKRIRTIESVPIMWKERIEKNPAELERYCLEVLKLSNPDIRVRKILIQSLIKRNGYYMQITGKTGNRMYVRNMVSLCLVQDWVNYIKKLEKDKDENISKEKNIRLYDVLMDKHINTIYNTRPNPVGDLLIKRRSDFIELKITDQVIILLEILKLTQTALGSANLKLIGEAEKTGVMLISKDITALDEMLLINQSVTGLYEQRVNLLTV

SEQ ID NO: 3116 - protein, 1358 aa, unidentified
  REGION 1..1358: note = Category: MG91 effectors
  REGION 1..1358: note = Description: MG91-308 effector
  source 1..1358: note = uncultivated organism sequence
MEKEYYLGLDMGTNSVGWAVTDDAYNLIRFKGKDMWGIREFDEANPAVERRTHRTSRRREQRNAVRMGLIRSYFADEIQKVDSNFYQRLDNSFFYVEDKQDNVKDKNGIFNDKNYKDADYYKQYPTIFHLRKELIEDASQKDVRLVYLAVANMFKHRGHFLLSGIGSESSKQTITDLYNQVSGLITEEYGISLKTDIAGTDFEQVLCSREYSRTRKSEKVCEILEIKNSDKLKKAFVKSMCGLSVKITDIIDDTFTEISDEDKKITFSFVDSDYDEKAGVLEEKLGTDVYDIISKLKEIHDKAQVAEIMKNYQYLSFARVADYEKHKKDLKILKRVVKKYFEPTVYDKLFRSEENGTYSAYVNSFNSEEKSRRNYKERKQEDLYNSIKKLLKSVDNVDDTDIEYIKNEMDKENFLPKQLTFKNGVIPNQIHASELKAILKNAEKYLPFLNEKDESGYTVSERILMLFSFQIPYYVGPVSSNSNGWVKRLEPGQVLPWNIDKKIDLKETSEQFIQRMVRNCTYIAGEKVLPKASLLYENFKVLNEINNLSINGERITVNLKQDLYNTLFLKGKRVTRKQIFNYFHSRGLVEEDSQISGIDIAVNNSLSTYGKFLPLFGEHLKEDKYKKMVDDIVFWCTVYGDSRKFLREQLEEKYSDVLDENQIKRITGMKFKDWGNLSKEFLELSGCCKSTGEVMPLIRAMWETNYNLMELLHSEEFTYSEELEEKQGKIEKVLSEYTIDDLNEEYFSAPVKRMVWQTLLIIKEIEKIMKCPPTRIFVEMTRKDDEKGDNGRKSSRKDQLLALYKKIQSEDKEWKKEMSSRIEDYDKNGALRSKKLYLYFIQKGLDMYTGKPIDLDNLMSANSNYDIDHIYPRHFVKDDNINNNLVLASKPANAEKSDIYPIKDSIYQKMKYTWKVLRDEGLITEEKYKRLTGRNPFTDEQKAGFIARQLVETGQGTKGVADLLTALLPDTKLVYSKAGNVSDFRKRYDIPKSRLINDFHHAHDAYLNIVVGNIYFTKFTSNPLNYIRKECSSKDNKYQYNLGNMYKWDVKRDGKTAWVAPEEGETGTLATVKKMLSRNTPILTRLTIEGHGGIADATLYSHKKAKQDTYIPLKSSDARMADVTKYGGYSSVTTAYLFLVEHEIKGKKIRTLETVPLYLKDRLENSKEKLEEYCRETLGYTNPSVRMKKIKLQSLIKLNGYYMQISGKTNKQFTVRNYVQFCLNSKWVDYIHKLEKYQDKGVIDDAITDEKNVELYNVLCEKHSVGIFTLRPNPVGDKIKKGYDKFVNLTTEEQIKLLIEIIKLTCVGIVSANLTLIGGASISGKMLISKNITDAKECLLINQSVTGLYENRIDLLRV

SEQ ID NO: 3117 - protein, 1358 aa, unidentified
  REGION 1..1358: note = Category: MG91 effectors
  REGION 1..1358: note = Description: MG91-309 effector
  source 1..1358: note = uncultivated organism sequence
MEKEYYLGLDMGTNSVGWAVTDDAYNLIRFKGKDMWGIREFDEANPAVERRTHRTSRRREQRNAVRMGLIRSYFADEIQKVDSNFYQRLDNSFFHVEDKQDNVKDKNGIFNDKNYKDADYYKQYPTIFHLRKELIEDASQKDVRLVYLAVANMFKHRGHFLLSGIGSESSKQTITDLYNQVSGLITEEYGISLKTDIAGTDFEQVLCSREYSRTRKSEKVCEILEIKNSDKLKKAFVKSMCGLSVKITDVIDDTFTEISDEDKKITFSFVDSDYDEKAGVLEEKLGTDVYDIISKLKEIHDKAQVAEIMKNYQYLSFARVADYEKHKKDLKILKRVVKKYFEPTVYDKLFRSGENGTYSAYVNSFNSGEKSRRNYKERKQEDLYNSIKKLIKSIDNVCDTDIEYIKNEIEKENFLPKQLTFKNGVIPNQIHASELKAILKNAEKYLPFLNEKDESGYTVSERILMLFSFQIPYYVGPVSPNSNGWVKRLEPGQVLPWNIDKKIDLKETSEQFIQRMVRNCTYIAGEKVLPKASLLYENFKVLNEINNLSINGERIAVALKQDLYNTLFLKGKRVTRKQIFNYFHSRGLVEEDSQISGIDIAVNNSLSTYGKFLPLFGEHLKEDKYKKMVDDIVFWCTVYGDSRKFLREQLEEKYSDVLDENQIKRITGMKFKDWGNLSKEFLELSGCCKSTGEMIPLIRAMWETNYNLMELLHSEEFTYSEELEEKQGKIEKVLSEYTIDDLNEEYFSAPVKRMVWQTLLIIKEIEKIMKCPPTRIFVEMTRKDDEKGDNGRKSSRKDQLLALYKKIQSEDKEWKKEMSSRIEDYDKNGALRSKKLYLYFIQKGLDMYTGKPIDLDNLMSANSNYDIDHIYPRHFVKDDNINNNLVLASKPANAEKSDIYPIKDSIYQKMKYTWKVLRDEGLITEEKYKRLTGRNPFTDEQKAGFIARQLVETGQGTKGVADLLTALLPDTKLVYSKAGNVSDFRKRYDIPKSRLINDFHHAHDAYLNIVVGNIYFTKFTSNPLNYIRKECSSKDNKYQYNLGNMYKWDVKRDGKTAWIAAKEGETGTIATVKKILSRNTPTLTRLTIEGHGGIADATLYSHKKAKQDAYIPLKSSDARMADVTKYGGYSSVTTAYLFLVEHEIKGKKIRTLETVPLYLKDRLENSKEKLEEYCRESLGYTNPSVRMKKIKLQSLIKLNGYYMQISGKSIKQFEVRNYVQICLNGKWVDYIHKLEKYQDKGVIDNAITDEKNVELYNILCEKHSVGIFTLRPNPVGDKIKKGYDKFVNLTTEEQIKLLIEIIKLTCVGIVKADLRLIGASEKSGTMKINKNITDAKECFLINQSVTGLYENRIDLLRV

SEQ ID NO: 3118 - protein, 1352 aa, unidentified
  REGION 1..1352: note = Category: MG91 effectors
  REGION 1..1352: note = Description: MG91-310 effector
  source 1..1352: note = uncultivated organism sequence
MQEKPYYLGLDMGTNSVGWAVTDQHYNLLKAKGKDLWGIREFIEADTSVERRTHRISRRRRQREQARIGLLNDYFHDAIIAIDPSFFQRLENSKYHLEDKDQNVRYKYNIFNDPDYTDADYYTQYPTIYHLRKELLENPKPHDVRLVYLALLNMFKHRGHFLNSGISDGNNERSLKDAYINFAISVSELTEDYFNQDVDYSTIEGILSSRDLNRTKKAEELSTVLGIDFKNKKYKEYLRAICGLKINAYTLFSDQLPDDTTKIDLCVSDASFDEKSEELVSLIGEDLFQIILNIKEIYDIGSLAGILKGYTYLSQARVAAYDKHKHDLKLLKSSIKKYCTKEEYNNFFNSDADGSYASYIGSFNSGNKERRVGSKRTSEDLYKEIKKLLKGANKSDPAINEIFTSIETESFLPKQLTASNGIIPNQVHSKEMARILTNAENYLPFLKETDENNLSISNRILQLYKFQIPYYIGPVTEKSQRDGGNGWVIRKDNGRVFPWNIEEKIDVKATSEAFISRMVRRCTYMNGKQVLPKASLEYESFRVLNEINNLRIDGERIPVTLKQDIYTDLFQKGKKVTKKQLCNYLATRGLIESSEQVTGIDIAINNSLSTYGKFKAIFGEDIKLDHIQHMIEDIVFWCTVYGDSKQFLKEQIEDKYKGKLSPEQMKRILGFKFKDWGNLSKEFFELKGADKSTGEAVSIIRALWENNLNLMELINSPEFDFKEQLADYEANSLKTLSDFEPEDLNDYYFSAPVRRMIWQTTLIIKELVHVLGKEPARIFIEMTREKDASRGRTLSRKKKFEDLYKNVKDENTDWAKVIEHADESGTIRSKKMYLYLTQKGRCMYTGNHIELSDLFNDNLYDIDHIYPRHFVKDDNIDNNLVLVTKEKNAHKSDNYPLEAEIFNKQRNMWTQLRKEGFISEEKFNRLMGRNAFTDEQKAGFIARQLVETSQGTKGVAELFHQLLPNSKIVYAKAGNVSDFRRNREFPKSRLVNDFHHAHDAYLNIVVGNVYYVKFTQNPINYIKNSYNKDMNKNNYNLSRMFDWDVKRGDEVAWIAQKQDGAAGTISTVKKMLSKNTPLMTRLSYEGKGALANETLYSAEKAKGEGYIPFKSSDTKIQDVTKYGGFTSVTGAYFFLVEHDEKKKRIRTIESVPLYLADKIDKDSSELERYCDKLGLVNYDVRVRKIKIGSLIKYNGYFCYITGKTGYRLIVRNATNLCLASNWRKYIKKIEKYKETTIIDNVITAEENIKLYNELLNKFTVGIFGRRPNPIGEKMDSARDKFASLSIENQCLALYQILQLTAILGNESDLQLIGASTHAGKMLISKKIGTDEIYLINQSPTGLFETKIDLQTI

SEQ ID NO: 3119 - protein, 1342 aa, unidentified
  REGION 1..1342: note = Category: MG91 effectors
  REGION 1..1342: note = Description: MG91-311 effector
  source 1..1342: note = uncultivated organism sequence
MRYFMGLDMGTSSVGWAVTDEHYQLLRRKGKDMWGIREFEEAATAVERRTHRVSRRRRQRQVARIGLLQEYFHDAIHQVDPNFYQRLKNSKYHEEDKDEIVRGSNGIFNDAEYTDKEYFKEFPTIFHLRQELIKSKEPHDVRLVYLALLNMFKHRGHFLNATLSADGESRKIKDIYTDFVDKAAEQLGISFATDIKYEELENYLSSNDLSRKRKGELIAELLHVTRKDKQQYALIECMLGLDKSVKLMFGDTLPEDFDKTIKVNFSDIAFEEKATEISEAIGEEKYDLILIMKEIYDAAILNRIMNGYTYLSDARVAEYEKHKSDLACLKHYIKEYGTQHQFDFLFRGTEKGSYSAYVHSVNSHEKQRRNMDGNKKEDLYSTLKKILKDMPENEEKTHIMMQIELDNFLPKQLTASNGVIPNQIHLKEMKKILANAENYLPFLKEKDESGYTVSERIQKLFAFQIPYYIGPTTEKSAEFGGNGWVVRKEEGKVLPWNIDQKIDMKKTSEEFISRMVRRCTYMNDEQVLPKESLEYESFCVLNELNNIKVYGEKLPVDIKQDIYRTLCEKGKRITKKSLMKYLVGRGVIKAEDEEQLTGLMDGLNNTLKSFAKFKAIFGDAIYEDSCKKMVEQIIFWCTVYGDSKHFLKEQLLEKYGEVLTDAQIKRILGIKFRDWGNLSKKFLELQGCSKETGEVNSLIRMLWETNDNLMELLAQDSYTFKEELENMQESTYKVLAELQPEDLDHMYFSAPVKRMIWQTILIIKEVTKVIGCQPERLFIEMTREHGQKNDIKDSRAKKFYELYSKIKDEDKDWRKVIEDADKDGRIRSKKMYLYLTQMGRCMYTGRPIELDQLFNNNLYDIDHIYPRHYVKDDNLENNMVLVEKQSNAHKSDVYPLESGIYEKQVNWWRELHRKNLINDEKLKRLTGRNPFTDEQKAGFIARQLVETSQGTKGVATILQEALPDTTLVYAKARNVSDFRKDNDLLKSRIVNDFHHAHDAYLNIVIGNVYYVKFTKNPINFIREHGTYNLGKMYAKDVKRGDEIAWVAQSGNGQTATMETIRRTMARNTPLLTRMSYEVTGGLANQTLYSANTAKEGTYIPLKSSDERMQDVTKYGGFTSVSTAYFMLVEHDGKKGKRIRTIESVPIMWKERIEKNPVELERYCLEVLKLSNPDIRVRKILIQSLIKRNGYFMYITGKTNKQLSVRNKVSLCLTQNWVNYIKNLENDNDDNITKKENLELYDILSDKHNNTIYRQRPNPVGSKLHKCRDRFINLKMNEQKVVLLEILKLTQIASTSANLELLGESKQTGVMFIGKDITALDEILLINQSVTGLYEQRVNLLTV

SEQ ID NO: 3120 - protein, 1352 aa, unidentified
  REGION 1..1352: note = Category: MG91 effectors
  REGION 1..1352: note = Description: MG91-312 effector
  source 1..1352: note = uncultivated organism sequence
MTAFKYYLGLDMGTNSVGWAATDPEYRLLKAKGKDLWGIREFNEASGAVERRTHRISRRRRQREQVRIGILKDYFHDAICEVDPSFFQRLENSKYHEEDKDVEVRYKNNIFNDSNYTDKDYFNEYPTIYHLRNELISSTEKHDVRLVFLALLNMFKHRGHFLNAGLGENNGESNIDNAYFELTELLSELTEYHLSQDIDCKQIEAILSRRDMSRTHKAEELAGVLHVDLKNKPYKELIRGLCGLKFNACVVFPDVQSEEVTKLDICLSESTFDEKSDEIANIIGEDYFEIIMAMKEMFDIGSLASIMKGHNYLSQARVASYTKHKEDLKLLKEVIKKYCGKKEYDKFFNSDADGSYASYVGSYNSKKKERRVGNKRTSEELYKEIKKLLKDAQKEDENVQKILTSIENETFLPKQLTASNGVIPNQVHAREMKKILSNAENYLPFLTKKDETGLSVSERILKLFTFQIPYYIGPTSENSGKNGGNGWVVRREDGQVLPWNIDEKIDMKATSEAFISRMVRRCTYISGEQVLPKASLEYQSYCVLNEINNIKIDGERISVELKQDIYKAVFQKGKKVTKKQLCKYLHTRGIIETEEQVTGVDVSINNALTTYGKFKPIFGEDISKDSVQKMIEDIVFWCTVYGDSKKFLKDRIEEKYGNKLSEEQIKRILGFKFKDWGNLSKKFLELNGADTSTGESISIIRALWNNNLNLMELINSSLYNYKECLAEYQNTMLKTLSEIEAEDLNEYYFSAPVRRMIWQTILVIKELVKVLGCEPERIFVEMTRKPDEHKTRTSSRRNKFEELYKKVKDETTDWMQVIANAEEDGKIRSKKMYLYLTQKGRCMYTGKHIELDDLFDNNLYDIDHIYPRHFVKDDNIDNNLVLVCKEKNAHKSDHYPIEEEIFLSQKKMWLELRKSGFITEEKYNRLMDRNPFSDEQKAGFIARQLVETSQGTKGVANILRQLLPGSKIVYAKASNVSEFRHTRDDIPKSRLVNDFHHAHDAYLNIVVGNVYYVKFTQNPLNFIKKDYDKYKEDYNLSKMFDWDVKRNGEVAWIAQRKDGEAGTITTVKKMLSRNTPLMTRYSFEGKGGLANETLYSAKKAKGEGYIPFKSSDDKMQDVTKYGGFTSVTGAYFFLVEHTEKKKRIRTIESVPVYLAQKIEQNPDELKKYCEEILGLIDADIRLKKIKIGSLIKRNGYFCYITGKTGKQLIVRNAVNLCLKNEWIKYISKLEKVKEIDAVDKIITKEKNEVLYSELIQKFKHGIFSKRPNPVGDKLEKGSEKFSNLSIKEQCAVLCQILQLAAVLGSECDMTLLGESAHCGKMLISKKIGDEEIYLINQSVTGLYEKKINLHTV

SEQ ID NO: 3121 - protein, 1351 aa, unidentified
  REGION 1..1351: note = Category: MG91 effectors
  REGION 1..1351: note = Description: MG91-313 effector
  source 1..1351: note = uncultivated organism sequence
MAAYYLGLDMGTSSVGWAVTNEQYELIKKKGKDLWGIREFDEAHTAVDRRMMRVSRRRRQRELARIGLLKEYFQDAIAEVDPNFYARLENSKYHLEDKDVSVRTYNGIFADKDYTDKEYFAEYPTIFHLRKELLESQEPHDVRLVYLALVNMFKHRGHFLNATLSSDSENRSIKDVWNEFAEQVYELLGISFSDEIDYMALQEIMCSTDISRKKKAEELVQLLKIDKKEKQKIALLECVIGLNVSIKTIFGACISDDFDPKMKISFSDAGYEEKIVDIQEVLGDENFELIAGMKALYDAAILNQIMGGNAYLSIARVQEYEKHKSDLKILKSIYRKYATKKDYDDMFRSTEKGSYSAYTNSTNSDKVANAENGGEPVRRGIEGRKKEDLYANIKKKLAEMPEDVQYVLNEIEKDHFLPKQLTASNGVIPNQIHLKEMKKILSNAENYLLFLKEKDESGYTTTERILKLFSFQIPYYVGPVTEKSARDGGNGWVVRKEDGVVLPWNINEKIDMKKTSEAFISRMVRRCTYMSGEQVLPKASLEYESFCVLNELNNLKVRGEKLPIEIKQNMYKDLFETGKRVTKNKIVKYLIGQGVLCEGNEDELTGLMDGINGTLSSFAKFRAVFGDAIYEDSCKKMVEQIIFWCTVYGDSKSFLKEQLEEKYAKDLTPEQMKRILGFKFKDWGNLSKEFLELNGCKKDTGEAASLIRMMWETNDNLMELLAKDKYTYQEKLQESQEKSYKILSEMQPEDLEDYYFSAPVKRMVWQTLLVIKEIEKVMGEPPKRLFVEMTRSEDKKKEMKDSRTKKFLELYKKIKDEDKDWKKIIESADEDGRIRSKKMYLYLTQKGRCMYTGRPIDLDQLFNNNLYDIDHIYPRHFVKDDNLENNLVLVEKEKNARKSDTYPLDEEIYKKQLNWWRELHQQNLINDEKFKRLTGRNPFSDEQKAGFIARQLVETSQGTKGVATILKEVLPEETTIVYAKARNVSDFRHDYNLLKSRIVNDFHHAQDAYLNIVVGNVYYVKFTQNPMNFIRENKSYNLGKMFAWDVKRGNETAWIAKPENGSAATIATVRKVMAKNTPLLTRLSFEGSGGIANQTLYSAKKTKEEGYIPLKSSDPKMQDIKKYGGYTSVTTAYFILVEHGTEKKRIRTIESVTLIWKDRIEKNPDELQVYCEKVLGLINPDIRVRKILIQSLIKREGYYMHISGKTENRLTLRNAVSLCLKTTWINYIKKLEKGEKTEEITKTSNIALYEELMRKHKETIYAKRPNPVGDKLLYGEDKFEKLELETQIKILLEILKLTQIGLPEADLREIGGAKSTGTIKVGKKISGLHELKLIHQSVTGIYEQQVDLLTV

SEQ ID NO: 3122 - protein, 1352 aa, unidentified
  REGION 1..1352: note = Category: MG91 effectors
  REGION 1..1352: note = Description: MG91-314 effector
  source 1..1352: note = uncultivated organism sequence
MTAFKYYLGLDMGTNSVGWAATDPGYRLLKAKGKDLWGIREFNEASGAVERRTHRISRRRRQREQVRIGILKDYFHDAICEVDPSFFQRLENSKYHEEDKDVEVRYKNNIFNDSNYTDKDYFNEYPTIYHLRNELISSTEKHDVRLVFLALLNMFKHRGHFLNAGLGENNGESNIDNAYFELTELLSELTEYHLSQDIDCKQIEAILSRRDMSRTHKAEELAGVLHVDLKNKPYKELIRGLCGLKFNACVVFPDVQSEEVTKLDICLSESTFDEKSDEIANIIGEDYFEIIMAMKEMFDIGSLASIMKGHNYLSQARVASYTKHKEDLKLLKEVIKKYCGKKEYDKFFNSDADGSYASYVGSYNSKNKERRVGNKRTSEELYKEIKKLLKDAQKEDENVQKILTSIENETFLPKQLTASNGVIPNQVHAREMKKILSNAENYLPFLTEKDETGLSVSERILKLFTFQIPYYVGPTSENSGKNGGNGWVVRREDGQVLPWNIDEKIDMKATSEAFISRMVRRCTYISGEQVLPKASLEYQSYCVLNEINNIKIDGERISVELKQDIYKAVFQKGKKVTKKQLCKYLHTRGIIETEEQVTGVDVSINNALTTYGKFKPIFGEDISKDSVQKMIEDIVFWCTVYGDSKKFLKDRIEEKYGNKLSEEQIKRILGFKFKDWGNLSKKFLELNGADTSTGESISIIRALWNNNLNLMELINSSLYNYKECLAEYQNTMLKTLSEIEAEDLNEYYFSAPVRRMIWQTILVIKELVKVLGCEPERIFVEMTRKPDEHKTRTSSRRNKFEELYKKVKDETTDWMQVIANAEEDGKIRSKKMYLYLTQKGRCMYTGKHIELDDLFDNNLYDIDHIYPRHFVKDDNIDNNLVLVCKEKNAHKSDHYPIEEEIFLSQKKMWLELRKSGFITEEKYNRLMDRNPFSDEQKAGFIARQLVETSQGTKGVTNILRQLLPGSKIVYAKASNVSEFRCTRDDIQKSRLVNDFHHAHDAYLNIVVGNVYYVKFTQNPLNFIKKDYDKYKEDYNLSKMFDWDVKRNGEVAWIAQRKDGAAGTITTVKRMLSRNTPLMTRYSFDGKGGLTNETLYSAKKAKGEGYIPFKSSDDKMQDVTKYGGFTSVTGAYFFLVEHTEKKKRIRTIESVPVYLAQKIEQNPDELKKYCEEILGLIDADIRLKKIKIGSLIKRNGYFCYITGKTVNRLIVRNAVNLCLKNEWIKYISKLEKVKEKDAVDKIITKEKNEVLYSELIQKFKHGIFSKRPNPVGDKLEKDSEKFNNLSIKDQCAVLCQVLRMAAILGSECDMTLLGDSPNCGKMLISKKIGDEEIYLINQSVTGLYEKKINLHTV

SEQ ID NO: 3123 - protein, 1352 aa, unidentified
  REGION 1..1352: note = Category: MG91 effectors
  REGION 1..1352: note = Description: MG91-315 effector
  source 1..1352: note = uncultivated organism sequence
MTAFKYYLGLDMGTNSVGWAATDPEYRLLKAKGKDLWGIREFNEASGAVERRTHRISRRRRQREQVRIGILKDYFHDAICEVDPSFFQRLENSKYHEEDKDVEVRYKNNIFNDSNYTDKDYFNEYPTIYHLRNELISSTEKHDVRLVFLALLNMFKHRGHFLNAGLGENNGESNIDNVYFELTELLSELTEYHLSQDIDCKQIEAILSRRDMSRTHKAEELAGVLHVDLKNKPYKELIRGLCGLKFNACVVFPDVQSEEVTKLDICLSESTFDEKSDEIANIIGEDYFEIIMAMKEMFDIGSLASIMKGHNYLSQARVASYTKHKEDLKLLKEVIKKYCGKKEYDKFFNSDADGSYASYVGSYNSKNKERRVGNKRTSEELYKEIKKLLKDAQKEDENVQKILTSIENETFLPKQLTASNGVIPNQVHAREMKKILSNAENYLPFLTEKDETGLPVSERILKLFTFQIPYYVGPTSENSGKNGGNGWVVRREDGQVLPWNIDEKIDMKATSEAFISRMVRRCTYISGEQVLPTASLEYQSYCVLNEINNIKIDGERISVELKQDIYKAVFQKGKKVTKKQLCKYLHTRGIIETEEQVTGVDVSINNALTTYGKFKPIFGEDISKDSVQKMIEDIVFWCTVYGDSKKFLKDRIEEKYGNKLSEEQIKRILGFKFKDWGNLSKKFLELNGADTSTGESISIIRALWNNNLNLMELINSSLYNYKECLAEYQNTMLKTLSEIEAEDLNEYYFSAPVRRMIWQTILVIKELVKVLGCEPERIFVEMTRKPDEHKTRTSSRRNKFEELYKKVKDETTDWMQVIANAEEDGKIRSKKMYLYLTQKGRCMYTGKHIELDDLFDNNLYDIDHIYPRHFVKDDNIDNNLVLVCKEKNAHKSDHYPIEEEIFLSQKKMWLELRKSGFITEEKYNRLMGRNPFSDEQKAGFIARQLVETSQGTKGVANILRQLLPGSKIVYAKASNVSEFRRTRDDIPKSRLVNDFHHAHDAYLNIVVGNVYYVKFTQNPLNFIKKDYDNYKEDYNLSKMFDWDVKRNGEVAWIAQRKDGEAGTITTVKKMLSRNTPLMTRYSFEGKGGLANETLYSAKKAKGEGYIPFKSSDDKMQDVTKYGGFTSVTGAYFFLVEHAEKKKRIRTIESVPVYLAQKIEQNPDELKKYCEEILGLIDADIRLKKIKIGSLIKRNGYFCYITGKTGKQLIVRNAVNLCLKNEWIKYISKLEKVKEKDAVDKIITKEKNEVLYSELIQKFKHGIFSKRPNPVGDKLEKGSEKFSNLSIKEQCTVLCQILQLAAVLGSECDMTLLGESAHCGKMLISKKIGDEEIYLINQSVTGLYEKKINLHTV

SEQ ID NO: 3124 - protein, 1352 aa, unidentified
  REGION 1..1352: note = Category: MG91 effectors
  REGION 1..1352: note = Description: MG91-316 effector
  source 1..1352: note = uncultivated organism sequence
MTAFKYYLGLDMGTNSVGWAATDPEYRLLKAKGKDLWGIREFNEASGAVERRTHRISRRRRQREQVRIGILKDYFHDAICEVDPSFFRRLENSKYHEEDKDVEVRYKNNIFNDGNYTDKDYFNEYPTIYHLRNELISSTEKHDVRLVFLALLNMFKHRGHFLNAGLGENNGESNIDNAYFELTELLSELTEYHLSQDIDCKQIEAILSRRDMSRTHKAEELAGVLHVDLKNKPYKELIRGLCGLKFNACVVFPDVQSEEVTKLDICLSESSFDEKSDEIANIIGEDYFEIIMAMKEMFDIGSLASIMKGHNYLSQARVASYTKHKEDLKLLKEVIKKYCGKKEYDKFFNSDADGSYASYVGSYNSKNKERRVGNKRTSEELYKEIKKLLKDAPKEDENVQKILTSIENETFLPKQLTASNGVIPNQVHAREMKKILSNAENYLPFLTEKDETGLSVSERILKLFTFQIPYYVGPTSENSGKNGGNGWVVRREDGQVLPWNIDEKIDMKATSEAFISRMVRRCTYISGEQVLPKASLEYQSYCVLNEINNIKIDGERISVELKQDIYKAVFQKGKKVTKKQLCKYLHTRGIIETEEQVTGVDVSINNALTTYGKFKPIFGEDISKDSVQKMIEDIVFWCTVYGDSKKFLKDRIEEKYGNKLSEEQIKRILGFKFKDWGNLSKKFLELNGADTSTGESISIIRALWNNNLNLMELINSSLYNYKECLAEYQNTMLKTLSEIEAEDLNEYYFSAPVRRIIWQTILVIKELVKVLGCEPERIFVEMTRKPDEHKTRTSSRRNKFEELYKKVKDEATDWMQVIAKAEEDGKIRSKKMYLYLTQKGRCMYTGKHIELDDLFDKNLYDIDHIYPRHFVKDDNIDNNLVLVCKEKNAHKSDHYPIEEEIFLSQKKMWLELRKSGFITEEKYNRLMGRSPFSDEQKAGFIARQLVETSQGTKGVANILRQLLPGSKIVYAKASNVSEFRHTRDDIPKSRLVNDFHHAHDAYLNIVVGNVYYVKFTQNPLNFIKKDYDKYKEDYNLSKMFDWDVKRNGEVAWIAQRKDGEAGTITTVKRMLSRNTPLMTRYSFEGKGGLANETLCSAKKAKGEGYIPFKSSDDKMQDVTKYGGFTKVTGAYFFLVEHTEKKKRIRTIESVPVYLAQKIEQNPDELKKYCEEILGLVDADIRLKKIKIGSLIKRNGYFCYITGKTGNRLSVRNAVNLCLKNEWIKYISKLEKVKEKDAVDEIITKEKNEVLYSELIQKFKHGIFSKRPNPVEDKLEKGSEKFSNLSIKEQCAVLCQILQLAAVLGSECDMTLLGDSPNCGKMLISKKIGDEEIYLLNQSVTGLYEKKINLHTV

SEQ ID NO: 3125 - protein, 1352 aa, unidentified
  REGION 1..1352: note = Category: MG91 effectors
  REGION 1..1352: note = Description: MG91-317 effector
  source 1..1352: note = uncultivated organism sequence
MTAFKYYLGLDMGTNSVGWAATDPEYRLLKAKGKDLWGIREFNEASGAVERRTHRISRRRRQREQVRIGILKDYFHDAICEVNPSFFRRLENSKYHEEDKDVEVRYKNNIFNDGNYTDKDYFNEYPTIYHLRNELISSTEKHDVRLVFLALLNMFKHRGHFLNAGLGENNGESNIDNAYFELTELLSELTEYHLSQDIDCKQIEAILSRRDMSRTHKAEELAGVLHVDLKNKPYKELIRGLCGLKFNACVVFPDVQSEEVTKLDICLSESSFDEKSDEIANIIGEDYFEIIMAMKEMFDIGSLASIMKGHNYLSQARVASYTKHKEDLKLLKEVIKKYCGKKEYDKFFNSDADGSYASYVGSYNSKNKERRVGNKRTSEELYKEIKKLLKDAPKEDENVQKILTSIENETFLPKQLTASNGVIPNQVHAREMKKILSNAENYLPFLTEKDETGLSVSERILKLFTFQIPYYVGPTSENSGKNGGNGWVVRREDGQVLPWNIDEKIDMKATSEAFISRMVRRCTYISGEQVLPKASLEYQSYCVLNEINNIKIDGERISVELKQDIYKAVFQKGKKVTKKQLCKYLHTRGIIETEEQVTGVDVSINNALTTYGKFKPIFGEDISKDSVQKMIEDIVFWCTVYGDSKKFLKDRIEEKYGNKLSEEQIKRILGFKFKDWGNLSKKFLELNGADTSTGESISIIRALWNNNLNLMELINSSLYNYKECLAEYQNTMLKTLSEIEAEDLNEYYFSAPVRRIIWQTILVIKELVKVLGCEPERIFVEMTRRPDEHKTRTSSRRNKFEELYKKVKDEATDWMQVIAKAEEDGKIRSKKMYLYLTQKGRCMYTGKHIELDDLFDKNLYDIDHIYPRHFVKDDNIDNNLVLVCKEKNAHKSDHYPIEEEIFLSQKKMWLELRKSGFITEEKYNRLMGRSPFSDEQKAGFIARQLVETSQGTKGVANILRQLLPGSKIVYAKASNVSEFRHTRDDIPKSRLVNDFHHAHDAYLNIVVGNVYYVKFTQNPLNFIKKDYDKYKEDYNLSKMFDWDVKRNGEVAWIAQRKDGEAGTITTVKRMLSRNTPLMTRYSFEGKGGLANETLCSAKKAKGEGYIPFKSSDDKMQDVTKYGGFTKVTGAYFFLVEHTEKKKRIRTIESVPVYLAQKIEQNPDELKKYCKEILGLVDADIRLKKIKIGSLIKRNGYFCYITGKTGNRLSVRNAVNLCLKNEWIKYISKLEKVKEKDAVDEIITKEKNEVLYSELIQKFKHGIFSKRPNPVEDKLEKGSEKFSNLSIKEQCAVLCQILQLAAVLGSECDMTLLGESAHCGKMLISKKIGDEEIYLLNQSVTGLYEKKINLHTV

SEQ ID NO: 3126 - protein, 359 aa, unidentified
  REGION 1..359: note = Category: MG91 effectors
  REGION 1..359: note = Description: MG91-318 effector
  source 1..359: note = uncultivated organism sequence
MYNKGGKNTTVSAKVNTNLSPDEKPKDLRGRFLSNQNYRLMKSVLRFSSEYVQGVRRVNDLVEMKCDDTKCKEITTNAKCQGECGKIFNNGKFLFCVYDTSAAAATASSSGEAKFKLVCNLCSNDYSYNNRYEVLQLFPTVSQQVVERLCEIGFLTKYIFPIKLNYTETQTKTEVINYHDFYKMVKSIIKEKKSNEQITEIKLSTYGRDLFVETDDFCVMRKDSNEFNETVYELDFFPKQSSMLEFLKIYKDNKPLTYFYTVKKRVYLSIFDYAVYFPFKCVLFCKVCTKNKMYLKTHPVLYCSKCGFTDPMFFNNSAFLESTIFLAKCVKYKTMPVARIFYYDMTLYKTFIKKPFVKK

SEQ ID NO: 3127 - protein, 1359 aa, unidentified
  REGION 1..1359: note = Category: MG91 effectors
  REGION 1..1359: note = Description: MG91-319 effector
  source 1..1359: note = uncultivated organism sequence
MRETGKDYYLGLDMGTNSVGWAVTDENYVLMRAKGKDLWGIREFDEALTAVDRRTHRVARRRRQREIARIGLLKEYFHDAIAEVDPDFYQRLDNSKYHEEDKDSAVKGKNGIFNDANYNDKDYFKQYPTIFHLRKELIESTEKHDVRLVYLALLNMFKHRGHFLNAGLSTESENTMDTAYHNFVETAAQTIECNFMETVDIEKIKEILGSRDYSRSKKAELVAQILHVDSKNKVQMACIKCICGLKVTAAAIFGDKMAADEEKKTDICFSDFGYDEKVPVILEIVGEENFELVLAMQEIYDIGSLAGIMKDSLYLSMARVKEYEQHGKDLRILKGVVKKYGTKEEYDTLFRTMEEGTYSAYVNSVNTKKKSRRDVKKRTRDEFYGRLKKIISKMPQNDSDVLYIKDKMEKEAFLPKQLTASNGVIPNQIHAREMKKILQNAEIYLPFLKEKDTSGLTVSERILKLFSFQIPYYVGPVSEKSKLNGGNGWVVRKEEGAVLPWNIEEKIDMTATSREFVERMVRRCSYLSDERVLPKGSLLYERFCVLNEINAIKVDGVKIPVEIKQDLYSKYFKKGKKVTKKKIAEFLIARGVIKEDQTELISGIDIAVNSTLSTYAKFYAIFGEKMEQDSYKKMVEQIVEWCTIYGDAKKFLEQKIKECYGNILTQEEIKRITGFKFRDWGRLSKEFLELSGCSKATGEVMPLISMMWETNDNLMELLDDNYYTYREALEEKQNNAFKLLADIEPEDLDEMYFSAPVKRMVWQTLCIIKELEKVLGKAPKRLFVEMTRNEQKDKKRTDSRKQQFLDLYKNIKDESRDWKELITRADENGTLKSKKMYLYLTQRGRCMYTGHPIDLEDLFKDNRYDIDHIYPRHFVKDDNIMNNLVLVEKEKNAHKSDNYPLEEEIYKKQLPMWKDLHQRKLITDEKFKRLTGRNEFTDEQKAGFIARQLVETSQGTKGVTTILERALPDTKIVYAKASNVSEFRQKRDLLKSRVVNDFHHAQDAYLNIVVGNVYFVKFTQNPLHFIKAEYDKNKAQYEYNLSRMFDRDVRRGNETAWIGCKKGEEAGTILTVKKMMAKNTPMLTRLSFEGKGGLADQTLYSAEKAKGNGYIPLKTSDSKMQDVTKYGGFNSVSTAYFFLVEHELKGKKVRTLETVPIIWRDRIEKDETMLLKYCTDVLELKNPSIRVKKIKLQSYIKKDGYYMYITGKTNKQITTKNAVELCVNQRWIDYIKIIEKTVEKKKEECEEIDYDKNVEFYDLLLTKHTQEIFSNRPNPVGAKLKQGRDKFVSLTLLEQCRVLYEILQLSIIGNTRADLQLIGGAAISGVMLLSKNITDSKEFILINQSVTGLFEQKVDLLTV

SEQ ID NO: 3128 - protein, 1365 aa, unidentified
  REGION 1..1365: note = Category: MG91 effectors
  REGION 1..1365: note = Description: MG91-320 effector
  source 1..1365: note = uncultivated organism sequence
MGDKKYYLGLDMGTNSVGWAVTDEKYCLLKAKGKDLWGIREFDEASTAVDRRMHRVSRRRRQRQVVRIGLLKDYFSDQIEKVDPYFYQRLENSKYYLEDKDEQVKDKNALFNDPGFNDRDYFKNYPTIFHLRKELIENPAPHDVRLVFLALLNMFKHRGHFLNAGLDSEGDSLGNMSEIYREFAEITADDLDFPIETKGEKIEDILSSRDHSRSVKSEMLIELFGFDKKDKKRREFVRAICGLKTDTTKLFGDDQGFSSEEKTEFSFSDAAYDEKVPDIVSIIGEDRYYILELMKAIYDKGTLSEILKGSDYLSQARVASYNKHSDDLLRMKKVVRKYGSPEEYDFFFRSTEDGSYSSYVGTVNSGKKKRRSMKGDFISETNKYMTKLKKDHEDDQEIDTILNDIALENFMPKQLTSSNGIIPYQVHLKEMKKILGNAEGYLPFLIEKDESGLSVSERIIQLFSFQIPYYVGPITSKSQSDGGNGWVVRKDEGTVLPWNIHDKIDMEKTQEEFIKKLIRKCTYISGETVLPKCSLLYEKFSVLNEINNLRIDNERIDPELKQDIYNDLFLAGKAVTKKQLMKYLMNRGLITQADQVSGADITSESNARFNSALSSYGKFISIFGSDKMKEDQYQEMAEHIIYLVTIFGDSKSVLRDYLKREYGTVLNEEQIKKITGMKFRDWGRLSKAFLELHGCNKADGESKSIVRAMWDNNLNLMELINSDEYTYKDELFEKTNVQTKCLAEFKAEDLDEYYFSAPVKRMIWQTVLLIKEIEYIMGGAPDRVFIEMTRKPEDKPTRKDSRKKKFMDLYSNIKEEQKYWKDLIETSDSNGTIRSKKMFLYLTQMGRDMYTGKQIELDRLFDDNLYDIDHIYPRHFVKDDNLQNNLVLVDKRKNARKSDNYPLEKEISSNPEVVALWKTLHEKKLITDEKYRRLTGRTPFTDEQKAGFIARQLVETGQGTKGVADILKMLLPKDTTIVYAKASNASEFRHKFDLPKSRLVNDFHHANDAYLNIVVGNVYYTKFTQNPLNYIKNEYRKNSQNAEYNLDKMFDRDVIRGDQIAWKASKKDGEAGTITTVKKMMQKNTPLLTRYSFVAHGGITRKDTIWGKEVAKTEGYIPLKASDKKLKDVTKYGGFNNVSGAYFFLVEYEKKRKKERSLEVVPIYLVDRFENNVSELEKYCREELGLANASVRMSKIRIQSLISIDGYRLHISGKSENRILLRNACSMCLNTDWIKYIQKIEKYVETEVLDEEILNKQKNERLYNILKEKHLYQIYSYRPNSIGEKLEKAEVIFCGLDVKKQCSALYQLLQLTSIGPAIGDLTLLKESKNSGTMRMSKNISGNKDLYLINQSVTGVYENKIDLLTV

SEQ ID NO: 3129 - protein, 1359 aa, unidentified
  REGION 1..1359: note = Category: MG91 effectors
  REGION 1..1359: note = Description: MG91-321 effector
  source 1..1359: note = uncultivated organism sequence
MRETGKDYYLGLDMGTNSVGWAVTDENYVLMRAKGKDLWGIREFDEALTAVDRRTHRVARRRRQRETARIGLLKEYFHDAIAEVDPDFYQRLDNSKYHEEDKDSAVKGKNGIFNDANYNDKDYFKQYPTIFHLRKELIESTEKHDVRLVYLALLNMFKHRGHFLNAGLSTESENTMDTAYHNFVETAAQTIECNFMETVDIEKIKEILGSRDYSRSKKAELVAQLLHVDSKNKVQMACIKCICGLKVTAAAIFGDKMAADEEKKTDICFSDFGYDEKVPVILEIVGEENFELVLAMQEIYDIGSLAGIMKDSLYLSMARVKEYEQHGKDLRILKGVVKKYGTKEEYDTLFRTMEEGTYSAYVNSVNTKKKSRRDVKKRTRDEFYGRLKKIISKMPQNDSDVLYIKDKMEKEAFLPKQLTASNGVIPNQIHAREMKKILQNAEIYLPFLKEKDTSGLTVSERILKLFSFQIPYYVGPVSEKSKLNGGNGWVVRKEEGTVLPWNIEEKIDMTATSREFVERMVRRCSYLSDERVLPKGSLLYERFCVLNEINAIKVDGVKIPVEIKQDLYSKYFKKGKKVTKKKIAEFLIARGVIKEDQTELISGIDIAVNSTLSTYAKFYAIFGEKMEQDSYKKMVEQIVEWCTIYGDAKKFLEQKIKECYGNILTQEEIKRITGFKFRDWGRLSKEFLELSGCSKATGEVMPLISMMWETNDNLMELLDDNYYTYREALEEKQNNAFKLLADIEPEDLDEMYFSAPVKRMVWQTLCIIKELEKVLGKAPKRLFVEMTRNEQKDKKRTDSRKQQFLDLYKNIKDESRDWKELITRADENGTLKSKKMYLYLTQRGRCMYTGHPIDLEDLFKDNRYDIDHIYPRHFVKDDNIMNNLVLVEKEKNAHKSDNYPLEEEIYKKQLPMWKDLHQCKLITDEKFKRLTGRNEFTDEQKAGFIARQLVETSQGTKGVTTILERALPDTKIVYAKASNVSEFRQKRDLLKSRVVNDFHHAQDAYLNIVVGNVYFVKFTQNPLHFIKAEYDKNKAQYEYNLSRMFDRDVRRGNETAWIGCKKGEEAGTILTVKKMMAKNTPMLTRLSFEGKGGLADQTLYSAEKAKGNGYIPLKTSDSKMQDVTKYGGFNSVSTAYFFLVEHELKGKKVRTLETVPIIWRDRIEKDETMLLKYCTDVLELKNPSIRVKKIKLQSYIKKDGYYMYITGKTNKQITTKNAVELCVNQRWIDYIKIIEKTVEKKKEECEEIDYDKNVEFYDLLLTKHTQEIFSNRPNPVGAKLKQGRDKFVSLTLLEQCRVLYEILQLSIIGNTRADLQLIGGAAISGVMLLSKNITDSKEFILINQSVTGLFEQKVDLLTV

SEQ ID NO: 3130 - protein, 1353 aa, unidentified
  REGION 1..1353: note = Category: MG91 effectors
  REGION 1..1353: note = Description: MG91-322 effector
  source 1..1353: note = uncultivated organism sequence
MEKDYYLGLDMGTDSVGWAVTDENYNLIRAKGKDLWGVREFDSAKPAADRRSYRISRRRRQREQVRLGMLKSIFADAIKEKDPLFFIRLENSKYWKDDKNSKINTKNVLFDDPGYTDADYFKEFPTIFHLRLKLMNDDSGRYLSDPRFVYLACLQLFKHRGHFLSDISDETDPSDLSSTYERFKSLYCELTGYEFTEKDVAADDIMNVLSDRNLSRTAKKEKLIDVFSFSKSDSSKTECLKSICGLESDACKIFPDLKTEDIKKLSFNFSKSDYEEKSAELNESVGDEYFELISILKDIYDKGTLADILKGKKYLSEARVEDYNKHKKDLVLLKSVYRKYKTQDEYNEMFRDPTKGYGAYIGSNFTKDKKTSRRGSKSRDVFYDYLKKSLKGLEEDPDVKTIFDDIAKENFLVKQLTSSNGVIPNQVHLKELKKILSNAENYLPFLKETDESGLSASQRIISIFSFTIPYYVGPVSELSEKNGGNGWVVRKEDGKVYPWNFEDKINISETKRRFIDRLINECTYISGEKVLPKQSLIYQKFAMLNELNSVRINGERLDVEFKQKAFKELFSKGKQVTLNEFKNYLNNNGINIDEKSEISGVGKSSEMTRFNNKLSSYQVFHSVFGDKLEDKKYYDAAENIIYLGTIYADDKKTFKKAIEEKYGDFLTPDEIKRVSGLKFKDWGTLSAALFNLQGAEKSTGEVMTLIDALWNTQLNFMELINSDAFSYKEELEKYKKKGEGTIQNFKFEELNDYYFSAPVKRMIWQTVLIVREIEHVLGKPPVKMFVEVTRHDEEKEKIPPSRKDTFLSLYKNIKDESHDWKAIIEKADESGVIRSQKMYLYLSQMGRDLYTGKEIELDELFTTKYDIDHIIPQSLKKDDSILNNKVLTSKDFNNNIKQDNPLCEAIDDAHYAERKKLWDRLHNYNLINDEKYKRLTNRKGFSEEDLEGFIARQIVETSQAVLGVINIFKEIMPDTKIVFSKAKPISDFRKNEIGWLKSRTLNDYHHAHDAYLNIVVGNVYNTKFTDNPRNFIKKERQKDLNPNYHMNKVFWYNVERGGKVAWIAGEDGTKKTVLKTLAKNSELMTRQSFEQTGGLCNQQITNKDDAGSGIGYLPVKMGEDISKYGGYAKISQSYFFLVEHTFKKKRIRTIETVPAYLKSQIESDPDALKRYCAEKLGLVDPDIRLRRINYQSLAKYNGFYVTICSKTGDRFQVANAVRLTLSKEWNNYIKKLEKTEGDEEITEEKNIELYDILTDKHLNSIFLKRPNPVGENLKNGREKFVSLSKKEQVSTLNNILLFTGFASAGKADISSIGGSKNAGAMAVSKNVNNADEFILIENSVTGIYSVRKDLKTI

SEQ ID NO: 3131 - protein, 1358 aa, unidentified
  REGION 1..1358: note = Category: MG91 effectors
  REGION 1..1358: note = Description: MG91-323 effector
  source 1..1358: note = uncultivated organism sequence
MEKEYYLGLDMGTNSVGWAVTDDAYNLIRFKGKDMWGIREFDEANPAVERRTHRTSRRREQRNAVRMGLIRSYFADEIQKVDSNFYQRLDNSFFHVEDKQDNVKDKNGIFNDKNYKDADYYKQYPTIFHLRKELIEDAFQKDVRLVYLAVANMFKHRGHFLLSGIGSESSKQTITDLYNQVSGLITEEYGISLKTDIAGTDFEQVLCSREYSRTRKLEKVCEILEIKNSDKLKKAFVKSMCGLSVKITDVIDDTFTEISDEDKKITFSFVDSDYDEKAGVLEEKLGTDVYDIISKLKEIHDKAQVAEIMKNYQYLSFARVADYEKHKKDLKILKRVVKKYFEPTVYDKLFRSGENGTYSAYVNSFNSGEKSRRNYKERKQEDLYNSIKKLLKSIDNVCDTDIEYIKNEIEKENFLPKQLTFKNGVIPNQIHASELKAILKNAEKYLPFLNEKDESGYTVSERILMLFSFQIPYYVGPVSPNSNGWVKRLEPGQVLPWNIDKKIDLKETSEQFIQRMVRNCTYIAGEKVLPKASLLYENFKVLNEINNLSINGERIAVALKQDLYNTLFLKGKRVTRKQIFNYFHSRGLVEEDSQISGIDIAVNNSLSTYGKFLPLFGEHLKEDKYKKMVDDIVFWCTVYGDSRKFLREQLEEKYSDVLDENQIKRITGMKFKDWGNLSKEFLELLGCCKSTGEMIPLIRAMWETNYNLMELLHSEEFTYSEELEEKQGKIEKVLSEYTIDDLNEEYFSAPVKRMVWQTLLIIKEIEKIMKCPPTRIFVEMTRKDDEKGDNGRKSSRKDQLLALYKKIQSEDKEWKKEMSSRIEDYDKNGALRSKKLYLYFIQKGLDMYTGKPIDLDNLMSANSNYDIDHIYPRHFVKDDNINNNLVLASKPANAEKSDIYPIKDSIYQKMKYTWKVLRDEGLITEEKYKRLTGRNPFTDEQKAGFIARQLVETGQGTKGVADLLTALLPDTKLVYSKAGNVSDFRKRYDIPKSRLINDFHHAHDAYLNIVVGNIYFTKFTSNPLNYIRKECSSKDNKYQYNLGNMYKWDVKRDGKTAWIAAKEGETGTLATVKKMLSRNTPILTRLAIEGHGGIADATLYSHKKAKQDAYIPLKSSDARMADVTKYGGYSSVTTAYLFLVEHEIKGKKIRTLETVPLYLKDRLENSKEKLEEYCRETLGYTNPSVRMKKIKLQSLIKLNGYYMQISGKTNKQFTVRNYVQFCLNSKWVDYIHKLEKYQDKGVIDDAITDEKNVELYNVLCEKHSVGIFTLRPNPVGDKIKKGYDKFVNLTTEEQIKLLIEIIKLTCVGIVSANLTLIGGASISGKMLISKNITDAKECLLINQSVTGLYENRIDLLRV

SEQ ID NO: 3132 - protein, 1358 aa, unidentified
  REGION 1..1358: note = Category: MG91 effectors
  REGION 1..1358: note = Description: MG91-324 effector
  source 1..1358: note = uncultivated organism sequence
MEKEYYLGLDMGTNSVGWAVTDDAYNLIRFKGKDMWGIREFDEANPAVERRTHRTSRRREQRNAVRMGLIRSYFADEIQKVDSNFYQRLDNSFFHVEDKQDNVKDKNGIFNDKNYKDADYYKQYPTIFHLRKELIEDASQKDVRLVYLAVANMFKHRGHFLLSGIGSESSKQTITDLYNQVSGLITEEYGISLKTDIAGTDFEQVLCSREYSRTRKSEKVCEILEIKNSDKLKKAFVKSMCGLSVKITDIIDDTFTEISDEDKKITFSFVDSDYDEKAGVLEEKLGTDVYDIISKLKEIHDKAQVAEIMKNYQYLSFARVADYEKHKKDLKILKRVVKKYFEPTVYDKLFRSEENGTYSAYVNSFNSGEKSRRNYKVRKQEDLYNSIKKLLKSVDNVYDTDIEYIKNEMDKENFLPKQLTFKNGVIPNQIHASELKAILKNAEKYLPFLNEKDESGYTVSERILMLFSFQIPYYVGPVSPNSNGWVKRLEPGQVLPWNIDKKIDLKETSEQFIQRMVRNCTYIAGEKVLPKASLLYENFKVLNEINNLSINGERIAVALKQDLYNTLFLKGKRVTRKQIFNYFHSRGLVEEDSQISGIDIAVNNSLSTYGKFLPLFGEHLKEDKYKKMVDDIVFWCTVYGDSRKFLREQLEEKYSDVLDENQIKRITGMKFKDWGNLSKEFLELSGCCKSTGEMIPLIRAMWETNYNLMELLHSEEFTYSEELEEKQGKIEKVLSEYTIDDLNEEYFSAPVKRMVWQTLLIIKEIEKIMKCPPTRIFVEMTRKDDEKGDNGRKSSRKDQLLALYKRIQSEDKEWKKEMSSRIEDYDKNGALRSKKLYLYFIQKGLDMYTGKPIDLDNLMSANSNYDIDHIYPRHFVKDDNINNNLVLASKPANAEKSDIYPIKDSIYQKMKYTWKVLRDEGLITEEKYKRLTGRNPFTDEQKAGFIARQLVETGQGTKGVADLLTALLPDTKLVYSKAGNVSDFRKMYDIPKSRLINDFHHAHDAYLNIVVGNIYFTKFTSNPLNYIRKECSSKDNKYQYNLGNMYKWDVKRDGKTAWIAAKEGETGTIATVKKMLSRNTHTLTRLTIEGHGGIADATLYSHKKAKQDAYIPLKSSDARMADVTKYGGYSSVTTAYLFLVEHEIKGKKIRTLETVPLYLKDRLENSKEKLEEYCRETLGYTNPSVRMKKIKLQSLIKLNGYYMQISGRTGNRFTLRNYIQLCLNGKWVDYIHKLEKYQDKGFIDNVITDEKNVELYNVLCEKHNVGIYTMRPNPVGDRIKNGYDKFVDLTIEEQIKLLIEIIKLTCVGIVSADLTLIGGAAISGKMLMSKNITDANECILINQSVTGLYENRIDLLRV

SEQ ID NO: 3133 - protein, 1358 aa, unidentified
  REGION 1..1358: note = Category: MG91 effectors
  REGION 1..1358: note = Description: MG91-325 effector
  source 1..1358: note = uncultivated organism sequence
MEKEYYLGLDMGTNSVGWAVTDDAYNLIRFKGKDMWGIREFDEANPAVERRTHRTSRRREQRNAVRMGLIRSYFADEIQKVDSNFYQRLDNSFFYVEDKQDNVKDKNGIFNDKNYKDANYYKQYPTIFHLRKELIEDASQKDVRLVYLAVANMFKHRGHFLLSGIGSESSKQTITDLYNQVSGLITEEYGISLKTDIAGTDFEQVLCSREYSRTRKSEKVCEILEIKNSDKLKKAFVKSMCGLSVKITDIIDDTFTEISDEDKKITFSFVDSDYDEKAGVLEEKLGTDVYDIISKLKEIHDKAQVAEIMKNYQYLSFARVADYEKHKKDLKILKRVVKKYFEPTVYDKLFRSEENGTYSAYVNSFNSEEKSRRNYKERKQEDLYNSIKKLLKSVDNVDDTDIEYIKNEMDKENFLPKQLTFKNGVIPNQIHASELKAILKNAEKYLPFLNEKDESGYTVSERILMLFSFQIPYYVGPVSSNSNGWGKRLEPGQGLPWNIDKKIDLKETSEQFIQRMVRNCTYIAGEKVLPKASLLYENFKVLNEINNLSINGERITVNLKQDLYNTLFLKGKRVTRKQIFNYFHSRGLVEEDSQISGIDIAVNNSLSTYGKFLPLFGEHLKEDKYKKMVDDIVFWCTVYGDSRKFLREQLEEKYSDVLDENQIKRITGMKFKDWGNLSKEFLELSGCCKSTGEVMPLIRAMWETNYNLMELLHSEEFTYSEELEEKQGKIEKVLSEYTIDDLNEEYFSAPVKRMVWQTLLIIKEIEKIMKCPPTRIFVEMTRKDDEKGDNGRKSSRKDQLLALYKKIQSEDKEWKKEMSSRIEDYDKNGALRSKKLYLYFIQKGLDMYTGKPIDLDNLMSANSNYDIDHIYPRHFVKDDNINNNLVLASKPANAEKSDIYPIKDSIYQKMKYTWKVLRDEGLITEEKYKRLTGRNPFTDEQKAGFIARQLVETGQGTKGVADLLTALLPDTKLVYSKAGNVSDFRKRYDIPKSRLINDFHHAHDAYLNIVVGNIYFTKFTSNPLNYIRKECSSKDNKYQYNLGNMYKWDVKRDGKTAWVAPEEGETGTLATVKKMLSRNTPILTRLTIEGHGGIADATLYSHKKAKQDTYIPLKSSDARMADVTKYGGYSSVTTAYLFLVEHEIKGKKIRTLETVPLYLKDRLENSKEKLEEYCRETLGYTNPSVRMKKIKLQSLIKLNGYYMQISGKTNKQFTVRNYVQFCLNSKWVDYIHKLEKYQDKGVIDDAITDEKNVELYNVLCEKHSVGIFTLRPNPVGDKIKKGYDKFVNLTTEEQIKLLIEIIKLTCVGIVSANLTLIGGASISGKMLISKNITDAKECLLINQSVTGLYENRIDLLRV

SEQ ID NO: 3134 - protein, 1358 aa, unidentified
  REGION 1..1358: note = Category: MG91 effectors
  REGION 1..1358: note = Description: MG91-326 effector
  source 1..1358: note = uncultivated organism sequence
MEKEYYLGLDMGTNSVGWAVTDDAYNLIRFKGKDMWGIREFDEANPAVERRTHRTSRRREQRNAVRMGLIRSYFADEIQKVDSNFYQRLDNSFFHVEDKQDNVKDKNGIFNDKNYKDANYYKQYPTIFHLRKELIEDVSQKDVRLVYLAVANMFKHRGHFLLSGIGSESSKQTITDLYNQVSGLITEEYGISLKTDIAGTDFEQVLCSREYSRTRKSEKVCEILEIKNSDKLKKAFVKSMCGLSVKITDVIDDTFTEISDEDKKITFSFVDSDYDEKAGVLEEKLGTDVYDIISKLKEIHDKAQVAEIMKNYQYLSFARVADYEKHKKDLKILKRVVKKYFEPTVYDKLFRSGENGTYSAYVNSFNSGEKSRRNYKERKQEDLYNSIKKLLKSIDNVCDTDIEYIKNEIEKENFLPKQLTFKNGVIPNQIHVSELKAILKNAEKYLPFLNEKDESGYTVSERILMLFSFQIPYYVGPVSPNSNGWVKRLEPGQVLPWNIDKKIDLKETSEQFIQRMVRNCTYIAGEKVLPKASLLYENFKVLNEINNLSINGERITVNLKQDLYNTLFLKGKRVTRKQIFNYFHSRGLVEEDSQISGIDIAVNNSLSTYGKFLPLFGEHLKEDKYKKMVDDIVFWCTVYGDSRKFLREQLEEKYSDVLDENQIKRITGMKFKDWGNLSKEFLELSGCCKSTGEVMPLIRAMWETNYNLMELLHSEEFTYSEELEEKQGKIEKVLSEYTIDDLNEEYFSAPVKRMVWQTLLIIKEIEKIMKCPPTRIFVEMTRKDDEKGDNGRKSSRKDQLLALYKKIQSEDKEWKKEMSSRIEDYDKNGALRSKKLYLYFIQKGLDMYTGKPIDLDNLMSANSNYDIDHIYPRHFVKDDNINNNLVLASKPANAEKSDIYPIKDSIYQKMKYTWKVLRDEGLITEEKYKRLTGRNPFTDEQKAGFIARQLVETGQGTKGVADLLTALLPDTKLVYSKAGNVSDFRKRYDIPKSRLINDFHHAHDAYLNIVVGNIYFTKFTSNPLNYIRKECSSKDNKYQYNLGNMYKWDVKRDGKTAWIAAKEGETGTLATVKKMLSRNTPILTRLAIEGHGGIADATLYSHKKAKQDAYIPLKSSDARMADVTKYGGYSSVTTAYLFLVEHEIKGKKIRTLETVPLYLKDRLENSKEKLEEYCRETLGYTNPSVRMKKIKLQSLIKLNGYYMQISGKTNKQFTVRNYVQFCLNSKWVDYIHKLEKYQDKGVIDDAITDEKNVELYNVLCEKHSVGIFTLRPNPVGDKIKKGYDKFVNLTTEEQIKLLIEIIKLTCVGIVSANLTLIGGASISGKMLISKNITDAKECLLINQSVTGLYENRIDLLRV

SEQ ID NO: 3135 - protein, 1358 aa, unidentified
  REGION 1..1358: note = Category: MG91 effectors
  REGION 1..1358: note = Description: MG91-327 effector
  source 1..1358: note = uncultivated organism sequence
MRETGKDYYLGLDMGTNSVGWAVTDENYVLMRAKGKDLWGIREFDEALTAVDRRTHRVARRRRQREIARIGLLKEYFHDAIAEVDPDFYQRLDNSKYHEEDKDSAVKGKNGIFNDANYNDKDYFKQYPTIFHLRKELIESTEKHDVRLVYLALLNMFKHRGHFLNAGLSTESENTMDTAYHNFVETAAQTIECNFMETVDIEKIKEILGSRDYSRSKKAELVAQILHVDSKNKVQMACIKCICGLKVTAAAIFGDKMAADEEKKTDICFSDFGYDEKVPVILEIVGEENFELVLAMQEIYDIGSLAGIMKDSLYLSMARVKEYEQHGKDLRILKGVVKKYGTKEEYDTLFRTMEEGTYSAYVNSVNTKKKSRRDVKKRTRDEFYGRLKKIISKMPQNDSDVLYIKDKMEKEAFLPKQLTASNGVIPNQIHAREMKKILQNAEIYLPFLKEKDTSGLTVSERILKLFSFQIPYYVGPVSEKSKLNGGNGWVVRKEEGTVLPWNIEEKIDMTATSREFVERMVRRCSYLSDERVLPKGSLLYERFCVLNEINAIKVDGVKIPVEIKQDLYSKYFKKGKKVTKKKNAEFLIARGVIKEDQTELISGIDIAVNSTLSTYAKFYAIFGEKMEQDSYKKMVEQIVEWCTIYGDAKKFLEQKIKECYGNVLTQEEIKRITGFKFRDWGRLSKEFLELSGCSKATGEVMPLISMMWETNDNLMELLDDNYYTYREALEEKQNNAFKLLADIEPEDLDEMYFSAPVKRMVWQTLCIIKELEKVLGKAPKRLFVEMTRNEQKDKKRTDSRKQQFLDLYKNIKDESRDWKELITRADENGTLKSKKMYLYLTQMGRCMYTGHPIDLEDLFKDNRYDIDHIYPRHFVKDDNIMNNLVLVEKEKNAHKSDNYPLEEEIYKKQLPMWKDLHQRKLITDEKFKRLTGRNEFTDEQKAGFIARQLVETSQGTKGVTTILERALPDTKIVYAKASNVSEFRQKRDLLKSRVVNDFHHAQDAYLNIVVGNVYFVKFTQNPLHFIKAEYDKNKAQYEYNLSRMFDRDVRRGNETAWIGCKKGEEAGTILTVKKMMAKNTPMLTRLSFEGKGGLADQTLYSAEKAKGNGYIPLKTSDSKMQDVTKYGGFNSVSTAYFFLVEHELKGKKVRTLETVPIIWRDRIEKDETMLLKYCTDVLELKNPSIRVKKIKLQSYIKKDGYYMYITGKTLNRIIIKNAVQMCLQQKWIVYIKNIEKAIQKKTIDATITYDANLELYNLIERKYKYEIFKNRPNPMGDKIEQGKKLFEEKSLLEQSKILYELLQLSAIGNVKADLQLIGGSASSGVMLIPKNITDSKEFILINQSVTGLFEQKVDLLTV

SEQ ID NO: 3136 - protein, 1342 aa, unidentified
  REGION 1..1342: note = Category: MG91 effectors
  REGION 1..1342: note = Description: MG91-328 effector
  source 1..1342: note = uncultivated organism sequence
MRYFMGLDMGTSSVGWAVTDEHYQLLRRKGKDMWGIREFEEAATAVERRTHRVSRRRRQRQVARIGLLQEYFHDAIHQVDPNFYQRLKNSKYHEEDKDEIVRESNGIFNDAEYTDKEYFKEFPTIFHLRQELIKSKEPHDVRLVYLALVNMFKHRGHFLNATLSADGESRKIKDIYTDFVDKAAEQLGVSFATDIRYEELENYLSSNDLSRKRKGELIAELLHVTRKDKQQYALIECMLGLDKSVKLMFGDTLPEDFDKTIKVNFSDIAFEEKATEISEAIGEEKYDLILIMKEIYDAAILNRIMNGYTYLSDARVAEYEKHKSDLACLKHYIKEYGTQQQFDFLFRGTEKGSYSAYVHSVNSHEKQRRNMAGNKKEDLYSALKKMLKDMPENEEKTCIMMQIELDNFLPKQLTASNGVIPNQIHLKEMKKILANAENYLPFLKEKDESGYTISERIQKLFAFQIPYYIGPTTEKSAEFGGNGWVVRKEEGKVLPWNIDQKIDMKKTSEKFISRMVRRCTYMNDEQVLPKESLEYESFCVLNELNNIKVYGEKLPVDIKQDIYRTLCEKGKRVTKKSLMQYLVGRGVIKAEDEEQLTGLMDGLNNTLKSFAKFKAIFGDAIYEDSCKKMVEQIIFWCTVYGDSKHFLKEQLLEKYGEVLTDAQIKRILGIKFRDWGNLSKKFLELQGCSKETGKVNSLIRMLWETNDNLMELLAQDSYTFKEELENMQESTYKVLTELQPEDLDHMYFSAPVKRMIWQTILIIKEVTKVMGCQPERLFIEMTREHGQKNDIKDSRAKKFYELYSKIKDEDKDWRKVIEDADKDGRIRSKKMYLYLTQMGRCMYTGRPIDLDQLFNNNLYDIDHIYPRHYVKDDNLENNMVLVEKQSNAHKSDVYPLESGIYEKQVNWWRELHRKNLINDEKLKRLTGRNPFTDEQKAGFIARQLVETSQGTKGVATILQEALPDTTLVYAKARNVSEFRSDNDLLKSRIVNDFHHAHDAYLNIVIGNVYYVKFTKNPINFIREHGTYNLGKMFAKDVKRGDDIGWVAQSGNGQTATMETIKRTMARNTPLLTRMSYEVTGGLANQTLYSASKAKEGTYIPLKSSDERMQDVTKYGGFTSVSTAYFMLVEHDGKKGKRIRTIESVPIMWKERIEKNPAELERYCLEVLKLSNPDIRVRKILIQSLIKRNGYYMQITGKTGNQLYVRNTVSLCLKQEWVNYIKKLEKGNDENITKDKNLVLYDILVDKHNNTIYSQRPNPVGEKLVKRREEFINLNLNDQVTVLLEILKLTQIALGGANLKLIGEAEKTGVMLISKDITTLDEMLLINQSVTGLYEQKVNLLTV

SEQ ID NO: 3137 - protein, 531 aa, unidentified
  REGION 1..531: note = Category: MG91 effectors
  REGION 1..531: note = Description: MG91-329 effector
  source 1..531: note = uncultivated organism sequence
MNEVFVLELPLRVEKYQADILNKRYEQLRQLYNYVQGKLRRQYSYFEQMKEFKACKTFKEKRDFFRSHPFYINETLKNNKTPFKVSFDEYGIKGYVEKLAQKLVGGNKSYADFGFTTLILDHLGASIWSAWNKKLYDLKAKHISYKKYDELNSFSSRRQVVHGVVYFSGIELHLDTMELSIKMNGKQGNNAKFITLKIQHNPKHADYELRALKGGLESVKVVKVVRRMVRSQYKYYVQLTIEGEKPQKGRTLGNGRVGIDLGPTTVAVSGENIVSIDKLASKCDNIQEEITRLSRKIDRSRRANNPQNFNEDGTIKRGVKLVWKKEKNLKRYSKLKRELAELRRKQAAIRKQQHIERANALLKEGDTFIVENNPVNAWVRRAKETKIDEKTGKYKSKRGSGRSVGNHAPAMFVDILENKVKSLGGRFERVNTQNAASQYDFTTDSFKTGDEKHKLNERAITLSNGDTHQRDMLAAFNLQHLKLDETKTKQYDTEAMAADYDRFCKLEREEIQRYKNKEKKDDRSTIGAEKL

SEQ ID NO: 3138 - protein, 1352 aa, unidentified
  REGION 1..1352: note = Category: MG91 effectors
  REGION 1..1352: note = Description: MG91-330 effector
  source 1..1352: note = uncultivated organism sequence
MTAFKYYLGLDMGTNSMGWAATDPEYRLLKAKGKDLWGIREFNEASGAVERRTHRISRRRRQREQVRIGILKDYFHDAICEVDPGFFRRLENSKYHEEDKDVEVRYKNNIFNDSNYTDKDYFNEYPTIYHLRNELISSTEKHDVRLVFLALLNMFKHRGHFLNAGLGENNGESNIDNAYFELTELLSELTEYHLSQDIDCKQIEAILSRRDMSRTHKAEELAGVLHVDLKNKPYKELIRGLCGLKFNACVVFPDVQSEEVTKLDICLSESTFDEKSDEIANIIGEDYFEIIMAMKEMFDIGSLASIMKGHNYLSQARVASYTKHKEDLKLLKEVIKKYCGKKEYDKFFNSDADGSYASYVGSYNSKNKERRVGNKRTSEELYKEIKKLLKDAQKEDENVQKILTSIENETFLPKQLTASNGVIPNQVHAREMKKILSNAENYLPFLTEKDETGLSVSERILKLFTFQIPYYVGPTSENSGKNGGNGWVVRREDGQVLPWNIDEKIDMKATSEAFISRMVRRCTYISGEQVLPKASLEYQSYCVLNEINNIKIDGERISVELKQDIYKAVFQKGKKVTKKQLCKYLHTRGIIETEEQVTGVDVSINNALTTYGKFKPIFGEDISKDSVQKMIEDIVFWCTVYGDSKKFLKDRIEEKYGNKLSEEQIKRILGFKFKDWGNLSKKFLELNGADTSTGESISIIRALWNNNLNLMELINSSLYNYKECLAEYQNTMLKTLSEIEAEDLNEYYFSAPVRRMIWQTILVIKELVKVLGCEPERIFVEMTRKPDEHKTRTSSRRNKFEELYKKVKDETTDWMQVIANAEEDGKIRSKKMYLYLTQKGRCMYTGKHIELDDLFDNNLYDIDHIYPRHFVKDDNIDNNLVLVCKEKNAHKSDHYPIEEEIFLSQKKMWLELRKSGFITEEKYNRLMGRNPFSDEQKAGFIARQLVETSQGTKGVANILRQLLPGSKIVYAKASNVSEFRRTRDDIPKSRLVNDFHHAHDAYLNIVVGNVYYVKFTQNPLNFIKKDYDNYKEDYNLSKMFDWDVKRNGEVAWIAQRKDGEAGTITTVKKMLSRNTPLMTRYSFEGKGGLANETLYSAKKAKGEGYIPFKSSDDKMQDVTKYGGFTSVTGAYFFLVEHAEKKKRIRTIESVPVYLAQKIEQNPDELKKYCEEILGLIDADIRLKKIKIGSLIKRNGYFCYITGKTGKQLIVRNAVNLCLKNEWIKYISKLEKVKEKDAVDKIITKEKNEVLYSELIQKFKHGIFSKRPNPVGDKLEKGSEKFSNLSIKEQCTVLCQILQLAAVLGSECDMTLLGESAHCGKMLISKKIGDEEIYLINQSVTGLYEKKINLHTV

SEQ ID NO: 3139 - protein, 1358 aa, unidentified
  REGION 1..1358: note = Category: MG91 effectors
  REGION 1..1358: note = Description: MG91-331 effector
  source 1..1358: note = uncultivated organism sequence
MEKEYYLGLDMGTNSVGWAVTDDAYNLIRFKGKDMWGIREFDEANPAVERRTHRTSRRREQRNAVRMGLIRSYFADEIQKVDSNFYQRLDNSFFHVEDKQDNVKDKNGIFNDKNYKDADYYKQYPTIFHLRKELIEDASQKDVRLVYLAVANMFKHRGHFLLSGIGSESSKQTITDLYNQVSGLITEEYGISLKTDIAGTDFEQVLCSREYSRTRKSEKVCEILEIKNSDKLKKAFVKSMCGLSVKITDVIDDTFTEISDEDKKITFSFVDSDYDEKAGVLEEKLGTDVYDIISKLKEIHDKAQVAEIMKNYQYLSFARVADYEKHKKDLKILKRVVKKYFEPTVYDKLFRSGENGTYSAYVNSFNSGEKSRRNYKERKQEDLYNSIKKLLKSIDNVCDTDIEYIKNEIEKENFLPKQLTFKNGVIPNQIHVSELKAILKNAEKYLPFLNEKDESGYTVSERILMLFSFQIPYYVGPVSPNSNGWVKRLEPGQVLPWNIDKKIDLKETSEQFIQRMVRNCTYIAGEKVLPKASLLYENFKVLNEINNLSINGERIAVALKQDLYNTLFLKGKRVTRKQIFNYFHSRGLVEEDSQISGIDIAVNNSLSTYGKFLPLFGEHLKEDKYKKMVDDIVFWCTVYGDSRKFLREQLEEKYSDVLDENQIKRITGMKFKDWGNLSKEFLELLGCCKSTGEMIPLIRAMWEINYNLMELLHSEEFTYSEELEEKQGKIEKVLSEYTIDDLNEEYFSAPVKRMVWQTLLIIKEIEKIMKCPPTRIFVEMTRKDDEKGDNGRKSSRKDQLLALYKKIQSEDKEWKKEMSLRIEDYDKNGALRSKKLYLYFIQKGLDMYTGKPIDLDNLMSANSNYDIDHIYPRHFVKDDNINNNLVLASKPANAEKSDIYPIKDSIYQKMKYTWKVLRDEGLITEEKYKRLTGRNPFTDEQKAGFIARQLVETGQGTKGVADLLTALLPDTKLVYSKAGNVSDFRKRYDIPKSRLINDFHHAHDAYLNIVVGNIYFTKFTSNPLNYIRKECSSKDNKYQYNLGNMYKWDVKRDGKTAWIAAKEGETGTIATVKKILSRNTPTLTRLTIEGHGGIADATLYSHKKAKQDAYIPLKSSDARMADVTKYGGYSSVTTAYLFLVEHEIKGKKIRTLETVPLYLKDRLENSKEKLEEYCRESLGYTNPSVRMKKIKLQSLIKLNGYYMQISGKSIKQFEVRNYVQICLNGKWVDYIHKLEKYQDKGVIDNAITDEKNVELYNILCEKHSVGIFTLRPNPVGDKIKKGYDKFVNLTTEEQIKLLIEIIKLTCVGIVKADLRLIGASEKSGTMKINKNITDAKECFLINQSVTGLYENRIDLLRV

SEQ ID NO: 3140 - protein, 1352 aa, unidentified
  REGION 1..1352: note = Category: MG91 effectors
  REGION 1..1352: note = Description: MG91-332 effector
  source 1..1352: note = uncultivated organism sequence
MTAFKYYLGLDMGTNSVGWAATDPEYRLLKAKGKDLWGIREFNEASGAVERRTHRISRRRKQREQVRIGILKDYFHDAICEVDPSFFQRLENSKYHEEDKDVEVRYKNNIFNDSNYTDKDYFNEYPTIYHLRNELISSTEKHDVRLVFLALLNMFKHRGHFLNAGLGENNGESNIDNAYFELTELLSELTEYHLSQDIDCKQIEAILSRRDMSRTHKAEELAGVLHVDLKNKPYKELIRGLCGLKFNACVVFPDVQSEEVTKLDICLSESTFDEKSDEIANIIGEDYFEIIMAMKEMFDIGSLASIMKGHNYLSQARVASYTKHKEDLKLLKEVIKKYCGKKEYDKFFNSDADGSYASYVGSYNSKNKERRVGNKRTSEELYKEIKKLLKDAQKEDENVQKILTSIENETFLPKQLTASNGVIPNQVHAREMKKILSNAENYLPFLTEKDETGLSVSERILKLFTFQIPYYVGPTSENSGKNGGNGWVVRREDGQVLPWNIDEKIDMKATSEAFISRMVRRCTYISGEQVLPKASLEYQSYCVLNEINNIKIDGERISVELKQDIYKAVFQKGKKVTKKQLCKYLHTRGIIETEEQVTGVDVSINNALTTYGKFKPIFGEDISKDSVQKMIEDIVFWCTVYGDSKKFLKDRIEEKYGNKLSEEQIKRILGFKFKDWGNLSKKFLELNGADTSTGESISIIRALWNNNLNLMELINSSLYNYKECLAEYQNTMLKTLSEIEAEDLNEYYFSAPVRRMIWQTILVIKELVKVLGCEPERIFVEMTRRPDEHKTRTSSRRNKFEELYKKVKDETTDWMQVIANAEEDGKIRSKKMYLYLTQKGRCMYTGKHIELDDLFDNNLYDIDHIYPRHFVKDDNIDNNLVLVCKEKNAHKSDHYPIEEEIFLSQKKMWLELRKSGFITEEKYNRLMDRNPFSDEQKAGFIARQLVETSQGTKGVANILRQLLPGSKIVYAKASNVSEFRCTRDDIPKSRLVNDFHHAHDAYLNIVVGNVYYVKFTQNPLNFIKKDYDKYKEDYNLSKMFDWDVKRNGEVAWIAQRKDGAAGTITTVKRMLSRNTPLMTRYSFDGKGGLTNETLYSAKKAKGEGYIPFKSSDDKMQDVTKYGGFTSVTGAYFFLVEHTEKKKRIRTIESVPVYLAQKIEQNPDELKKYCEEILGLIDADIRLKKIKIGSLIKRNGYFCYITGKTGNRLIVRNAVNLCLKNEWIKYISKLEKVKEKDAVDKIITKEKNEVLYSELIQKFKHGIFSKRPNPVGDKLEKDSEKFNNLSIKDQCAVLCQVLRMAAILGSECDMTLLGDSPNCGKMLISKKIGDEEIYLINQSVTGLYEKKINLHTV

SEQ ID NO: 3141 - protein, 1359 aa, unidentified
  REGION 1..1359: note = Category: MG91 effectors
  REGION 1..1359: note = Description: MG91-333 effector
  source 1..1359: note = uncultivated organism sequence
MLEKPYYLGLDMGTNSVGWAVTDQQYNLLKAKGKDLWGIREFAEADTSVERRTHRISRRRRQREQARIGLLNDYFHDAIIAIDPSFFQRLENSKYHLEDKDQNVRYKYNIFNDPDYTDADYYTQYPTIYHLRKELLENPKPHDVRLVYLALLNMFKHRGHFLNSGISDGNNERSLKDAYINFAISVSELTEDYFNQDVDYSTIEGILSSRDLNRTKKAEELSTVLGIDFKNKKYKEYLRAICGLKINAYTLFSDQLLDDTTKIDLCVSDASFDEKSEELVSLIGEDLFQIILNIKEIYDIGSLAGILKGYTYLSQARVAAYDKHKHDLKLLKSSIKKYCTKEEYNNFFNSDADGSYASYIGSFNSGNKERRVGSKRTSEDLYKEIKKLLKGANKSDPAINEIFTSIETESFLPKQLTASNGIIPNQVHSKEMARILTNAENYLPFLKETDENNLSISNRILQLYKFQIPYYIGPVTEKSQRDGGNGWVIRKDNGRVFPWNIEEKIDVKATSEAFISRMVRRCTYMNGKQVLPKASLEYESFRVLNEINNLRIDGERIPVTLKQDIYTDLFQKGKKVTKKQLCNYLATRGLIESSEQVTGIDIAINNSLSTYGKFKAIFGEDIKLDHIQHMIEDIVFWCTVYGDSKQFLKEQIEDKYKGKLSPEQMKRILGFKFKDWGNLSKEFFELKGADKSTGEAVSIIRALWENNLNLMELINSPEFDFKEQLADYEANSLKTLSDFEPEDLNDYYFSAPVRRMIWQTTLIIKELVHVLGKEPARIFIEMTREKDASRGRTLSRKKKFEDLYKNVKDENTDWAKVIEHADESGTIRSKKMYLYLTQKGRCMYTGNHIELSDLFNDNLYDIDHIYPRHFVKDDNIDNNLVLVTKEKNAHKSDNYPLEAEIFNKQRNMWTQLRKEGFISEEKYNRLMGRNAFTDEQKAGFIARQLVETSQGTKGVAELFHQLLPNSKIVCAKAGNVSDFRRNRELPKSRLVNDFHHAHDAYLNIVVGNVYYVKFTQNPINYIKNSYNKDMNKNNYNLSRMFDWDVKRGDEVAWIAQKQDGATGTISTVKKMLSKNTPLMTRLSYEGKGALANETLYSAEKAKGEGYIPFKSSDTKIQDVTKYGGFTSVTGAYFFLVEHDEKKKRIRTIESVPLYLADKIDKDSSELERYCDKLGLVNYDIRVRKIKIGSLLNRNGYFAYLTGKTGKQLILRNATNLCLDKKWTRYIKKIEKYKETNVLDSIITSETMVNLYNELLNKFTVGIYGRRPNPIGEKMDSAKNTFTSYTLDNQCNLIYQILQLSKILGFETDLSLLRTNKQSGKPTREGGMQISKKIDNTTSMYLINQSPTGLFETKIDLQTI

SEQ ID NO: 3142 - protein, 1352 aa, unidentified
  REGION 1..1352: note = Category: MG91 effectors
  REGION 1..1352: note = Description: MG91-334 effector
  source 1..1352: note = uncultivated organism sequence
MTAFKYYLGLDMGTNSVGWAATDPEYRLLKAKGKDLWGIREFNEASGAVERRTHRISRRRRQREQVRIGILKDYFHDAICEVDPSFFRRLENSKYHEEDKDVEVRYKNNIFNDGNYTDKDYFNEYPTIYHLRNELISSTEKHDVRLVFLALLNMFKHRGHFLNAGLGENNGESNIDNAYFELTELLSELTEYHLSQDIDCKQIEAILSRRDMSRTHKAEELAGVLHVDLKNKPYKELIRGLCGLKFNACVVFPDVQSEEVTKLDICLSESSFDEKSDEIANIIGEDYFEIIMAMKEMFDIGSLASIMKGHNYLSQARVASYTKHKEDLKLLKEVIKKYCGKKEYDKFFNSDADGSYASYVGSYNSKNKERRVGNKRTSEELYKEIKKLLKDAPKEDENVQKILTSIENETFLPKQLTASNGVIPNQVHAREMKKILSNAENYLPFLTEKDETGLSVSERILKLFTFQIPYYVGPTSENSGKNGGNGWVVRREDGQVLPWNIDEKIDMKATSEAFISRMVRRCTYISGEQVLPKASLEYQSYCVLNEINNIKIDGERISVELKQDIYKAVFQKGKKVTKKQLCKYLHTRGIIETEEQVTGVDVSINNALTTYGKFKPIFGEDISKDSVQKMIEDIVFWCTVYGDSKKFLKDRIEEKYGNKLSEEQIKRILGFKFKDWGNLSKKFLELNGADTSTGESISIIRALWNNNLNLMELINSSLYNYKECLAEYQNTMLKTLSEIEAEDLNEYYFSAPVRRIIWQTILVIKELVKVLGCEPERIFVEMTRKPDEHKTRTSSRRNKFEELYKKVKDEATDWMQVIAKAEEDGKIRSKKMYLYLTQKGRCMYTGKHIELDDLFDKNLYDIDHIYPRHFVKDDNIDNNLVLVCKEKNAHKSDHYPIEEETFLSQKKMWLELRKSGFITEEKYNRLMGRSPFSDEQKAGFIARQLVETSQGTKGVANILRQLLPGSKIVYAKASNVSEFRHTRDDIPKSRLVNDFHHAHDAYLNIVVGNVYYVKFTQNPLNFIKKDYDKYKEDYNLSKMFDWDVKRNGEVAWIAQRKDGEAGTITTVKRMLSRNTPLMTRYSFEGKGGLANETLCSAKKAKGEGYIPFKSSDDKMQDVTKYGGFTKVTGAYFFLVEHTEKKKRIRTIESVPVYLAQKIEQNPDELKKYCEEILGLVDADIRLKKIKIGSLIKRNGYFCYITGKTGNRLSVRNAVNLCLKNEWIKYISKLEKVKEKDAVDEIITKEKNEVLYSELIQKFKHGIFSKRPNPVEDKLEKGSEKFSNLSIKEQCAVLCQILQLAAVLGSECDMTLLGESAHCGKMLISKKIGDEEIYLLNQSVTGLYEKKINLHTV

SEQ ID NO: 3143 - protein, 1352 aa, unidentified
  REGION 1..1352: note = Category: MG91 effectors
  REGION 1..1352: note = Description: MG91-335 effector
  source 1..1352: note = uncultivated organism sequence
MLEKPYYLGLDMGTNSVGWAVTDQHYNLLKAKGKDLWGIREFTEADTSVERRTHRISRRRRQREQARIGLLNDYFHDTIIAIDPSFFQRLENSKYHLEDKDQNVRYKYNIFNDPDYTDVDYYTQYPTIYHLRKELLENPKPHDVRLVYLALLNMFKRRGHFLNAGISDGNNERSLKDAYINFAISVSELTEDYFNQDVDYSAIEEILSSRDLNRTKKAEELSTVLGIDFKNKKYKEYLRAICGLKINAYTLFSDQLPDDTTKIDLCVSDASFDEKSEELVSLIGEDLFQIILNIKEIYDIGSLTGILKGYTYLSQARVAAYNKHKHDLKLLKSSIKKYCTKEEYNNFFNSDADGSYASYIGSFNSGSKERRVGSKRTSEDLYKEIKKLLKDANKSDPAINEIFTSIETESFLPKQLTASNGIIPNQVHSKEMAKILSNAENYLPFLKDTDENNLSISNRILQLYKFQIPYYIGPVTEKSQRDGGNGWVIRKDNGRVLPWNIEEKIDVKATSEAFISRMVRRCTYMNGKQVLPKASLEYESFRVLNEINNLRIDGERIPVALKQDIYTDLFQKGKKVTKKQLCNYLVTRGLIESSEQVTGIDIAINNSLSTYGKFKAILGEDIKLDHIQHMIEDIVFWCTVYGDSKQFLKEQIEDKYKEKLSPEQMKRILGFKFKDWGNLSKEFFELKGADKSTGEAISIIRALWDNNLNLMELINSPEFDFKERLTDYQTNSLKTLSDFEPEDLNEYYFSAPVRRMIWQTTLIIKELVHVLGKEPDRIFIEMTREKDASRGRTLSRKKKFEDLYKNVKDENTDWAKVIEHANESGTIRSKKMYLYLTQKGRCMYTGKHIELSDLFNDNLYDIDHIYPRHFVKDDNIDNNLVLVTKEKNAHKSDNYPLEAEIFNKQRNMWTQLRKEGFISEEKYNRLMGRNAFTDEQKAGFIARQLVETSQGTKGVAELFHQLLPNSKIVYAKAGNVSDFRRNRELPKSRLVNDFHHAHDAYLNIVVGNVYYVKFTQNPINYIKNSYNKDMNKNNYNLSRMFDWDVKRGDEVAWIAQKKDGAAGTISTVKKMLSRNTPLMTRLSYEGKGALANETLYSAEKAKGEGYIPFKSSDAKIQDVTKYGGFTSVTGAYFFLVEHDEKKKRIRTIESVPLYLANKIEKDSSELERYCDKLGLINYDIRVRKIKIGSLLNRNGYFAYLTGKTGKQLILRNATNLCLDKKWTIYIKKIEKYKEANVLDSIITSEENIKLYNELLNKFTVGIYGRRPNPIGEKMDSARDKFASLSIENQCLALYQILQLSAILGNESDLQLIGASTHAGKMLISKKIGTDEIYLINQSPTGLFETKIDLQTI

SEQ ID NO: 3144 - protein, 1331 aa, unidentified
  REGION 1..1331: note = Category: MG91 effectors
  REGION 1..1331: note = Description: MG91-336 effector
  source 1..1331: note = uncultivated organism sequence
MRYFMGLDMGTSSVGWAVTDEHYQLLRRKGKDMWGIREFEEAATAVERRTHRVSRRRRQRQVARIGLLQEYFHDAIHQVDPNFYQRLKNSKYHEEDKDEIVRESNGIFNDAEYTDKEYFKEFPTIFHLRQELIKSKEPHDVRLVYLALLNMFKHRGHFLNATLSADGESRKIKDIYTDFVDKAAEQLGVSFATDIRYEELENYLSSNDLSRKRKGELIAELLHVTRKDKQQYALIECMLGLDKSVKLMFGDTLPEDFDKTIKVNFSDIAFEEKATEISEAIGEEKYDLILIMKEIYDAAILNRIMNGYTYLSDARVAEYEKHKSDLACLKHYIKEYGTQQQFDFLFRGTEKGSYSAYVHSVNSHEKQRRNMAGNKKEDLYSALKKMLKDMPENEEKTCIMMQIELDNFLPKQLTASNGVIPNQIHLKEMKKILANAENYLPFLKEKDESGYTVSERIQKLFAFQIPYYIGPTTEKSAEFGGNGWVVRKEEGKVLPWNIDQKIDMKKTSEKFISRMVRRCTYMNDEQVLPKESLEYESFCVLNELNNIKVYGEKLPVDIKQDIYRTLCEKGKRVTKKSLMQYLVGRGVIKAEDEEQLTGLMDGLNNTLKSFAKFKAIFGDAIYEDSCKKMVEQIIFWCTVYGDSKHFLKEQLLEKYGEVLTGAQIKRILGIKFRDWGNLSKKFLELQGCSKETGEVNSLIRMLWETNDNLMELLAQDSYTFKEELENMQESTYKVLTELQPEDLDHMYFSAPVKRMIWQTILIIKEVTKVMGCQPERLFIEMTREHGQKNDIKDSRAKKFYELYSKIKDEDKDWRKVIEDADKDGRIRSKKMYLYLTQMGRCMYTGRPIDLDQLFNNNLYDIDHIYPRHYVKDDNLENNMVLVEKQSNAHKSDVYPLESGIYEKQVNWWRELHRKNLINDEKLKRLTGRNPFTDEQKAGFIARQLVETSQGTKGVATILQEALPDTTLVYAKARNVSEFRSDNDLLKSRIVNDFHHAHDAYLNIVIGNVYYVKFTKNPINFIREHGTYNLGKMFAKDVKRGDDIGWVAQSGNGQTATMETIKRTMARNTPLLTRMSYEVTGGLANQTLYSASKAKEGTYIPLKSSDERMQDVTKYGGFTSVSTAYFMLVEHDGKKGKRIRTIESVPIMWKERIEKNPAELERYCLDVLKLSNPDIRVRKILIQSLIKRNGYYMQITGKTGNRMYVRNMVSLCLVQDWVNYIKKLEKDKDENISKEKNINTIYNTRPNPVGDLLIKRRSDFIELKITDQVIILLEILKLTQTALGSANLKLIGEAEKTGVMLISKDITALDEMLLINQSVTGLYEQRVNLLTV

SEQ ID NO: 3145 - protein, 1358 aa, unidentified
  REGION 1..1358: note = Category: MG91 effectors
  REGION 1..1358: note = Description: MG91-337 effector
  source 1..1358: note = uncultivated organism sequence
MEKEYYLGLDMGTNSVGWAVTDDAYNLIRFKGKDMWGIREFDEANPAVERRTHRTSRRREQRNAVRMGLIRSYFADEIQKVDSNFYQRLDNSFFHVEDKQDNVKDKNGIFNDKNYKDADYYKQYPTIFHLRKELIEDASQKDVRLVYLAVANMFKHRGHFLLSGIGSESSKQTITDLYNQVSGLITEEYGISLKTDIAGTDFEQVLCSREYSRTRKSEKVCEILEIKNSDKLKKAFVKSMCGLSVKITDVIDDTFTEISDEDKKITFSFVDSDYDEKAGVLEEKLGTDVYDIISKLKEIHDKAQVAEIMKNYQYLSFARVADYEKHKKDLKILKRVVKKYFEPTVYDKLFRSGENGTYSAYVNSFNSGEKSRRNYKERKQEDLYNSIKKLLKSIDNVCDTDIEYIKNEIEKENFLPKQLTFKNGVIPNQIHASELKAILKNAEKYLPFLNEKDESGYTVSERILMLFSFQIPYYVGPVSSNSNGWVKRLEPGQVLPWNIDKKIDLKETSEQFIQRMVRNCTYIAGEKVLPKASLLYENFKVLNEINNLSINGERIAVALKQDLYNTLFLKGKRVTRKQIFNYFHSRGLVEEDSQISGIDIAVNNSLSTYGKFLPLFGEHLKEDKYKKMVDDIVFWCTVYGDSRKFLREQLEEKYSDVLDENQIKRITGMKFKDWGNLSKEFLELLGCCKSTGEMIPLIRAMWETNYNLMELLHSEEFTYSEELEEKQGKIEKVLSEYTIDDLNEEYFSAPVKRMVWQTLLIIKEIEKIMKCPPTRIFVEMTRKDDEKGDNGRKSSRKDQLLALYKKIQSEDKEWKKEMSSRIEDYDKNGALRSKKLYLYFIQKGLDMYTGKPIDLDNLMSANSNYDIDHIYPRHFVKDDNINNNLVLASKPANAEKSDIYPIKDSIYQKMKYTWKVLRDEGLITEEKYKRLTGRNPFTDEQKAGFIARQLVETGQGTKGVADLLTALLPDTKLVYSKAGNVSDFRKRYDIHKSRLINDFHHAHDAYLNIVVGNIYFTKFTSNPLNYIRKECSSKDNKYQYNLGNMYKWDVKRDGKTAWIAAKEGETGTIATVKKILSRNTPTLTRLTIEGHGGIADATLYSHKKAKQDAYIPLKSSDARMADVTKYGGYSSVTTAYLFLVEHEIKGKKIRTLETVPLYLKDRLENSKEKLEEYCRESLGYTNPSVRMKKIKLQSLIKLNGYYMQISGKSIKQFEVRNYVQICLNGKWVDYIHKLEKYQDKGVIDNAITDEKNVELYNILCEKHSVGIFTLRPNPVGDKIKKGYDKFVNLTTEEQIKLLIEIIKLTCVGIVKADLRLIGASEKSGTMKINKNITDAKECFLINQSVTGLYENRIDLLRV

SEQ ID NO: 3146 - protein, 1358 aa, unidentified
  REGION 1..1358: note = Category: MG91 effectors
  REGION 1..1358: note = Description: MG91-338 effector
  source 1..1358: note = uncultivated organism sequence
MEKEYYLGLDMGTNSVGWAVTDDAYNLIRFKGKDMWGIREFDEANPAVERRTHRTSRRRKQRNAVRMGLIRSYFADEIQKVDSNFYQRLDNSFFHVEDKQDNVKDKNGIFNDKNYKDADYYKQYPTIFHLRKELIEDASQKDVRLVYLAVANMFKHRGHFLLSGIGSESSKQTITDLYNQVSGLITEEYGISLKTDIAGTDFEQVLCSREYSRTRKSEKVCEILEIKNSDKLKKAFVKSMCGLSVKITDIIDDTFTEISDEDKKITFSFVDSDYDEKAGVLEEKLGTDVYDIISKLKEIHDKAQVAEIMKNYQYLSFARVADYEKHKKDLKILKRVVKKYFEPTVYDKLFRSEENGTYSAYVNSFNSEEKSRRNYKERKQEDLYNSIKKLLKSVDNVDDTDIEYIKNEMDKENFLPKQLTFKNGVIPNQIHASELKAILKNAEKYLPFLNEKDESGYTVSERILMLFSFQIPYYVGPVSSNSNGWVKRLEPGQVLPWNIDKKIDLKETSEQFIQRMVRNCTYIAGEKVLPKASLLYENFKVLNEINNLSINGERITVNLKQDLYNTLFLKGKRVTRKQIFNYFHSRGLVEEDSQISGIDIAVNNSLSTYGKFLPLFGEHLKEDKYKKMVDDIVFWCTVYGDSRKFLREQLEEKYSDVLDENQIKRITGMKFKDWGNLSKEFLELSGCCKSTGEVMPLIRAMWETNYNLMELLHGEEFTYSEELEEKQGKIEKVLSEYTIDDLNEEYFSAPVKRMVWQTLLIIKEIEKIMKCPPTRIFVEMTRKDDEKGDNGRKSSRKDQLLALYKKIQSEDKEWKKEMSSRIEDYDKNGALRSKKLYLYFIQKGLDMYTGKPIDLDNLMSANSNYDIDHIYPRHFVKDDNINNNLVLASKPANAEKSDIYPIKDSIYQKMKYTWKVLRDEGLITEEKYKRLTGRNPFTDEQKAGFIARQLVETGQGTKGVADLLTALLPDTKLVYSKAGNVSDFRKRYDIPKSRLINDFHHAHDAYLNIVVGNIYFTKFTSNPLNYIRKECSSKDNKYQYNLGNMYKWDVKRDGKTAWVAPEEGETGTLATVKKMLSRNTPILTRLTIEGHGGIADATLYSHKKAKQDTYIPLKSSDARMADVTKYGGYSSVTTAYLFLVEHEIKGKKIRTLETVPIYLKDRLENSKEKLEEYCRETLGYTNPSVRMKKIKLQSLIKLNGYYMQISGRTGNRFTLRNYVQLCLNGKWVDYIHKLEKYQDKGVIDDLITDERNVELYNVLCEKHSVGIFTLRPNLVGDKIKNGYDKFVNLTTEEQIKLLIEIIKLTCVGIVSANLTLIGGAAISGKMLMSKNITYANECILINQSVTGLYENRIDLLRV

SEQ ID NO: 3147 - protein, 1352 aa, unidentified
  REGION 1..1352: note = Category: MG91 effectors
  REGION 1..1352: note = Description: MG91-339 effector
  source 1..1352: note = uncultivated organism sequence
MTAFKYYLGLDMGTNSVGWAATDPEYRLLKAKGKDLWGIREFNEASGAVERRTHRISRRRKQREQVRIGILKDYFHDAICEVDPSFFQRLENSKYHEEDKDVEVRYKNNIFNDGNYTDKDYFNEYPTIYHLRNELISSTEKHDVRLVFLALLNMFKHRGHFLNAGLGENNGESNIDNAYFELTELLSELTEYHLSQDIDCKQIEAILSRRDMSRTHKAEELAGVLHVDLKNKPYKELIRGLCGLKFNACVVFPDVQSEEVTKLDICLSESTFDEKSDEIANIIGEDYFEIIMAMKEMFDIGSLASIMKGHNYLSQARVASYTKHKEDLKLLKEVIKKYCGKKEYDKFFNSDADGSYASYVGSYNSKNKERRVGNKRTSEELYKEIKKLLKDAQKEDENIQKILTSIENETFLPKQLTASNGVIPNQVHAREMKKILSNAENYLPFLTEKDETGLSVSERILKLFTFQIPYYVGPTSENSGKNGGNGWVVRREDGQVLPWNIDEKIDMKATSEAFISRMVRRCTYISGEQVLPKASLEYQSYCVLNEINNIKIDGERISVELKQDIYKAVFQKGKKVTKKQLCKYLHTRGIIETEEQVTGVDVSINNALTTYGKFKPIFGEDISKDSVQKMIEDIVFWCTVYGDSKKFLKDRIEEKYGNKLSEEQIKRILGFKFKDWGNLSKKFLELNGADTSTGESISIIRALWNNNLNLMELINSSLYNYKECLAEYQNTMLKTLSEIEAEDLNEYYFSAPVRRMIWQTILVIKELVKVLGYEPERIFVEMTRKPDEHKTRTSSRRNKFEELYKKVKDETTDWMQVIANAEEDGKIRSKKMYLYLTQKGRCMYTGKHIELDDLFDNNLYDIDHIYPRHFVKDDNIDNNLVLVCKEKNAHKSDHYPIEEEIFLSQKKMWLELRKSGFITEEKYNRLMGRSPFSDEQKAGFIARQLVETSQGTKGVANILRQLLPGSKIVYAKASNVSEFRHTRDDIPKSRLVNDFHHAHDAYLNIVVGNVYYVKFTQNPLNFIKKDYDKYKEDYNLSKMFDWDVKRNGEVAWIAQRKDGEAGTITTVKKMLSRNTPLMTRYSFEGKGGLANETLYSAKKAKGEGYIPFKSSDDKMQDVTKYGGFTKVTGAYFFLVEHTEKKKRIRTIESVPVYFVQKIEKNPGELKKYCEEILGLVDADIRLKKIKIGSLIKRNGYFCYITGKTGNRLSVRNAVNLCLKNEWIKYISKLEKVKEKDTIDEIITKEKNEVLYSELIQKFKHCIFSKRPNPVGDKLEKGSEKFSNLSIKDQCAVLCQVLRMAAILGSECDMTLLGESSICGEMKISKKIGDEEIYLINQSVTGLYEKKINLHTV

SEQ ID NO: 3148 - protein, 1358 aa, unidentified
  REGION 1..1358: note = Category: MG91 effectors
  REGION 1..1358: note = Description: MG91-340 effector
  source 1..1358: note = uncultivated organism sequence
MEKEYYLGLDMGTNSVGWAVTDDAYNLIRFKGKDMWGIREFDEANPAVERRTHRTSRRRKQRNAVRMGLIRSYFADEIQKVDSNFYQRLDNSFFHVEDKQDNVKDKNGIFNDKNYKDADYYKQYPTIFHLRKELIEDASQKDVRLVYLAVANMFKHRGHFLLSGIGSESSKQTITDLYNQVSGLITEEYGISLKTDIAGTDFEQVLCSREYSRTRKSEKVCEILEIKNSDKLKKAFVKSMCGLSVKITDIIDDTFTEISDEDKKITFSFVDSDYDEKAGVLEEKLGTDVYDIISKLKEIHDKAQVAEIMKNYQYLSFARVADYEKHKKDLKILKRVVKKYFEPTVYDKLFRSEENGTYSAYVNSFNSEEKSRRNYKERKQEDLYNSIKKLLKSVDNVDDTDIEYIKNEMDKENFLPKQLTFKNGVIPNQIHASELKAILKNAEKYLPFLNEKDESGYTVSERILMLFSFQIPYYVGPVSSNSNGWVKRLEPGQVLPWNIDKKIDLKETSEQFIQRMVRNCTYIAGEKVLPKASLLYENFKVLNEINNLSINGERITVNLKQDLYNTLFLKGKRVTRKQIFNYFHSRGLVEEDSQISGIDIAVNNSLSTYGKFLPLFGEHLKEDKYKKMVDDIVFWCTVYGDSRKFLREQLEEKYSDVLDENQIKRITGMKFKDWGNLSKEFLELSGCCKSTGEVMPLIRAMWETNYNLMELLHSEEFTYSEELEEKQGKIEKVLSEYTIDDLNEEYFSAPVKRMVWQTLLIIKEIEKIMKCPPTRIFVEMTRKDDEKGDNGRKSSRKDQLLALYKKIQSEDKEWKKEMSSRIEDYDKKGALRSKKLYLYFIQKGLDMYTGKPIDLDNLMSANSNYDIDHIYPRHFVKDDNINNNLVLASKPANAEKSDIYPIKDSIYQKMKYTWKVLRDEGLITEEKYKRLTGRNPFTDEQKAGFIARQLVETGQGTKGVADLLTALLPDTKLVYSKAGNVSDFRKKYDIPKSRLINDFHHAHDAYLNIVVGNIYFTKFTSNPLNYIRKECSSKDNKYQYNLGNMYKWDVKRDGKTAWIAAKEGETGTIATVKKMLSRNTPTLTRLTIEGHGGIADATLYSHKKAKQDAYIPLKSSDARMADVTKYGGYSSVTTAYLFLVEHEIKGKKIRTLETVPLYLKDRLENSKEKLEEYCRETLGYTNPSVRMKKIKLQSLIKLNGYYMQISGKTNKQFTVRNYVQFCLNSKWVDYIYKLEKYQDKGVIDDAITDEKNVELYNVLCEKHSVGIFTLRPNPVGDKIKKGYDKFVNLTTEEQIKLLIEIIKLTCVGIVSANLTLIGGASISGKMLISKNITDAKECLLINQSVTGLYENRIDLLRV

SEQ ID NO: 3149 - protein, 1352 aa, unidentified
  REGION 1..1352: note = Category: MG91 effectors
  REGION 1..1352: note = Description: MG91-341 effector
  source 1..1352: note = uncultivated organism sequence
MQEKPYYLGLDMGTNSVGWAVTDQHYNLLKAKGKDLWGIREFIEADTSVERRTHRISRRRRQREQARIGLLNDYFHDAIIAIDPSFFQRLENSKYHLEDKDQNVRYKYNIFNDPDYTDADYYTQYPTIYHLRKELLENPKPHDVRLVYLALLNMFKHRGHFLNSGISDGNNERSLKDAYINFAISVSELTEDYFNQDVDYSTIEGILSSRDLNRTKKAEELSTVLGIDFKNKKYKEYLRAICGLKINAYTLFSDQLPDDTTKIDLCVSDASFDEKSEELVSLIGEDLFQIILNIKEIYDIGSLAGILKGYTYLSQARVAAYDKHKHDLKLLKSSIKKYCTKEEYNNFFNSDADGSYASYIGSFNSGNKERRVGSKRTSEDLYKEIKKLLKGANKSDPAINEIFTSIETESFLPKQLTASNGIIPNQVHSKEMARILTNAENYLPFLKETDENNLSISNRILQLYKFQIPYYIGPVTEKSQRDGGNGWVIRKDNGRVFPWNIEEKIDVKATSEAFISRMVRRCTYMNGKQVLPKASLEYESFRVLNEINNLRIDGERIPVTLKQDIYTDLFQKGKKVTKKQLCNYLATRGLIESSEQVTGIDIAINNSLSTYGKFKAIFGEDIKLDHIQHMIDDIVFWCTVYGDSKQFLKEQIEDKYKGKLSPEQMKRILGFKFKDWGNLSKEFFELKGADKSTGEAVSIIRALWENNLNLMELINSSEFDFKEQLADYEANSLKTLSDFEPEDLNDYYFSAPVRRMIWQTTLIIKELVHVLGKEPARIFIEMTREKDASRGRTLSRKKKFEDLYKNVKDENTDWAKVIEHADESGTIRSKKMYLYLTQKGRCMYTGNHIELSDLFNDNLYDIDHIYPRHFVKDDNIDNNLVLVTKEKNAHKSDNYPLEAEIFNKQRNMWTQLRKEGFISEEKYNRLMGRNAFTDEQKAGFIARQLVETSQGTKGVAELFHQLLPNSKIVYAKAGNVSDFRRNRELPKSRLVNDFHHAHDAYLNIVVGNVYYVKFTQNPINYIKNSYNKDMNKNNYNLSRMFDWDVKRGDEVAWIAQKQDGAAGTISTVKKMLSKNTPLMTRLSYEGKGALANETLYSAEKAKGEGYIPFKSSDTKIQDVTKYGGFTSVTGAYFFLVEHDEKKKRIRTIESVPLYLADKIDKDSSELERYCDKLGLVNYDVRVRKIKIGSLIKYNGYFCYITGKTGYRLIVRNATNLCLTSNWRKYIKKIEKYKETTIIDNVITAEENIKLYNELLNKFTVGIFGRRPNPIGEKMDSARDKFASLSIENQCLALYQILQLTAILGNESDLQLIGASTHAGKMLISKKIGTDEIYLINQSPTGLFETKIDLQTI

SEQ ID NO: 3150 - protein, 1358 aa, unidentified
  REGION 1..1358: note = Category: MG91 effectors
  REGION 1..1358: note = Description: MG91-342 effector
  source 1..1358: note = uncultivated organism sequence
MEKEYYLGLDMGTNSVGWAVTDDAYNLIRFKGKDMWGIREFDEANPAVERRTHRTSRRREQRNAVRMGLIRSYFADEIQKVDSNFYQRLDNSFFHVEDKQDNVKDKNGIFNDKNYKDADYYKQYPTIFHLRKELIEDASQKDVRLVYLAVANMFKHRGHFLLSGIGSESSKQTITDLYNQVSGLITEEYGISLKTDIAGTDFEQVLCSREYSRTRKSEKVCEILEIKNSDKLKKAFVKSMCGLSVKITDVIDDTFTEISDEDKKITFSFVDSDYDEKAGVLEEKLGTDVYDIISKLKEIHDKAQVAEIMKNYQYLSFARVADYEKHKKDLKILKRVVKKYFEPTVYDKLFRSGENGTYSAYVNSFNSGEKSRRNYKERKQEDLYNSIKKLIKSIDNVCDTDIEYIKNEIEKENFLPKQLTFKNGVIPNQIHASELKAILKNAEKYLPFLNEKDESGYTVSERILMLFSFQIPYYVGPVSPNSNGWVKRLEPGQVLPWNIDKKIDLKETSEQFIQRMVRNCTYIAGEKVLPKASLLYENFKVLNEINNLSINGERIAVALKQDLYNTLFLKGKRVTRKQIFNYFHSRGLVEEDSQISGIDIAVNNSLSTYGKFLPLFGEHLKEDKYKKMVDDIVFWCTVYGDSRKFLREQIEEKYSDVLDENQIKRITGMKFKDWGNLSKEFLELSGCCKSTGEMIPLIRAMWETNYNLMELLHSEEFTYSEELEEKQGKIEKVLSEYTIDDLNEEYFSAPVKRMVWQTLLIIKEIEKIMKCPPTRIFVEMTRKDDEKGDNGRKSSRKDQLLALYKKIQSEDKEWKKEMSSRIEDYDKNGALRSKKLYLYFIQKGLDMYTGKPIDLDNLMSANSNYDIDHIYPRHFVKDDNINNNLVLASKPANAEKSDIYPIKDSIYQKMKYTWKVLRDEGLITEEKYKRLTGRNPFTDEQKAGFIARQLVETGQGTKGVADLLTALLPDTKLVYSKAGNVSDFRKRYDIPKSRLINDFHHAHDAYLNIVVGNIYFTKFTSNPLNYIRKECSSKDNKYQYNLGNMYKWDVKRDGKTAWIAAKEGETGTIATVKKILSRNTPTLTRLTIEGHGGIADATLYSHKKAKQDAYIPLKSSDARMADVTKYGGYSSVTTAYLFLVEHEIKGKKIRTLETVPLYLKDRLENSKEKLEEYCRESLGYTNPSVRMKKIKLQSLIKLNGYYMQISGKSIKQFEVRNYVQICLNGKWVDYIHKLEKYHDKGVIDNAITDEKNVELYNILCEKHSVGIFTLRPNPVGDKIKKGYDKFVNLTTEEQIKLLIEIIKLTCVGIVKADLRLIGASEKSGTMKINKNITDAKECFLINQSVTGLYENRIDLLRV

SEQ ID NO: 3151 - protein, 1358 aa, unidentified
  REGION 1..1358: note = Category: MG91 effectors
  REGION 1..1358: note = Description: MG91-343 effector
  source 1..1358: note = uncultivated organism sequence
MEKEYYLGLDMGTNSVGWAVTDDAYNLIRFKGKDMWGIREFDEANPAVERRTHRTSRRREQRNAVRMGLIRSYFADEIQKVDSNFYQRLDNSFFHVEDKQDNVKDKNGIFNDKNYKDANYYKQYPTIFHLRKELIEDVSQKDVRLVYLAVANMFKHRGHFLLSGIGSESSKQTITDLYNQVSGLITEEYGISLKTDIAGTDFEQVLCSREYSRTRKSEKVCEILEIKNSDKLKKAFVKSMCGLSVKITDVIDDTFTEISDEDKKITFSFVDSDYDEKAGVLEEKLGTDVYDIISKLKEIHDKAQVAEIMKNYQYLSFARVADYEKHKKDLKILKRVVKKYFEPTVYDKLFRSGENGTYSAYVNSFNSGEKSRRNYKERKQEDLYNSIKKLLKSIDNVCDTDIEYIKNEIEKENFLPKQLTFKNGVIPNQIHVSELKAILKNAEKYLPFLNEKDESGYTVSERILMLFSFQIPYYVGPVSPNSNGWVKRLEPGQVLPWNIDKKIDLKETSEQFIQRMVRNCTYIAGEKVLPKASLLYENFKVLNEINNLSINGERITVNLKQDLYNTLFLKGKRVTRKQIFNYFHSRGLVEEDSQISGIDIAVNNSLSTYGKFLPLFGEHLKEDKYKKMVDDIVFWCTVYGDSRKFLREQLEEKYSDVLDENQIKRITGMKFKDWGNLSKEFLELSGCCKLTGEVMPLIRAMWETNYNLMELLHSEEFTYSEELEEKQGKIEKVLSEYTIDDLNEEYFSAPVKRMVWQTLLIIKEIEKIMKCPPTRIFVEMTRKDDEKGDNGRKSSRKDQLLALYKKIQSEDKEWKKEMSSRIEDYDKKGALRSKKLYLYFIQKGLDMYTGKPIDLDNLMSANSNYDIDHIYPRHFVKDDNINNNLVLASKPANAEKSDIYPIKDSIYQKMKYTWKVLRDEGLITEEKYKRLTGRNPFTDEQKAGFIARQLVETGQGTKGVADLLTALLPDTKLVYSKAGNVSGFRKRYDIPKSRLINDFHHAHDAYLNIVVGNIYFTKFTSNPLNYIRKECSSKDNKYQYNLGNMYKWDVKRDGKTAWIAAKEGETGTIATVKKILSRNTPTLTRLTIEGHGGIADATLYSHKKAKQDAYIPLKSSDARMADVTKYGGYSSVTTAYLFLVEHEIKGKKIRTLETVPLYLKDRLENSKEKLEEYCRETLGYTNPSVRMKKIKLQSLIKLNGYYMQISGRTGNRFTLRNYVQLCLNGKWVDYIHKLEKYQDKGFIDNVITDEKNVELYNVLCEKHNVGIYTMRPNPVGDRIKNGYDKFVNLTIEEQIKLLIEIIKLTCVGIVSADLTLIGGASISGKMLISKNITDAKECLLINQSVTGLYENRIDLLRV

SEQ ID NO: 3152 - protein, 1347 aa, unidentified
  REGION 1..1347: note = Category: MG91 effectors
  REGION 1..1347: note = Description: MG91-344 effector
  source 1..1347: note = uncultivated organism sequence
MEEKEYYLGLDMGTNSVGWAVTDPQYRILRAKGKDMWGIREFESAETAEKRRGHRTSRRRRQREVVRMGLVKDYFSDAINNVDGNFYARLENSKYHLEDKDEAVRNKNGIFADEHYTDKEYYAEYPTIYHLIMELINNPAPHDVRLVYLAVANLFKRRGHFLNAGLSEDGGNQSMQTAYDEFNTTCNETIGFSFPGIDATQIEEVLKNRNYSKTVKSEKLAELLGVEKKEKQRIEILRAIAGRKVNAKVIFPNVETEDKVEFSFSDAAFDDNATELMTLLGDECYSLVLCMREMYDIGTLAEIMHGYQYLSESRMADYQKHHEDLVLLKSVIKSECTQKQYDELFRLDGEGSYSAYVNSTLAKNHKQRRSMKGRTRDDFYKKVRGLIGKSSNPDAIKICTEIENETFMPKMLTSANGIIPNQVHYKELKAILSNAEKYLPFLLEKDESGLTTSDRIQRLYKFRIPYYVGPVSNRDGKGNGWAVRKEEGMVLPWNLEEKIDLSKTKEAFIENLIRRCTYISDEKVLPKNSLIYEKFTVLNEINNIRINDERISVELKQDIYNELFKKGKKVTRKTLVKYLINRGVIEAENQISGIDIAINNSLSSYGKFKAVFGESMDTDTTKKMVEDIIKTSTIYGDDKRELKNILRDKYGEILSEDQIKRIAGFRFKDWGRLSRAFLELAGADRSTGEVTSIIQALWESQLNLMELLHSEDYTFGESLNEKLVKNEKSLSEITAEDLDDYYFSAPVKRMAWQTILLIKEISKIKGCEPSKIFIEMTRTDEEKGDKGRKNSRAKELTALYKNIKKEGKAWIELIGKEDASGRLKSKKMYLYIKQMGRDMYTGEQIDLDRLFDDNLYDIDHIYPRHFVKDNNIENNLVLVNKAKNSRKSDNYPLDSDIVRNPKVRELWEMLHTNHLMSDEKYHRLTSRKAFTDEDLAGFIARQLVETGQATKGVADLLKELTSSEIIYSKAGNVSDFRHAYDIPKSRIVNEFHHAHDAYLNIVVGNAYYTKFTSNPLNYIRNEYKKNTKENNYHLNKIFESTISRNGYVAWLAGSDKNPGTIQTVKKMLSRNTPLMTRMTFVVHGSIADETLYGKNTAKEDSYLPLKGSDPRMSVEKYGGFNKASGAYFFLVEHELKGKKVRTIETVPVYLMKKLSDERELQKYCEEKLGLINPSIRLKQIKMQSLIKLDGYFVNVTGRTNQRLTLRNAVNLKLDKEDIYIIHLVEKCIGEERDDRLSEESILSLYQTLTEKQASGIYRNRPNSVYEKLNEGMIRFNNLERKQQIKVLANILNLTMVGKAQADLKDIGGSANSGVMLMAKKINNYNEVKLINQSVTGLYQTEVDLLTV

SEQ ID NO: 3153 - protein, 1352 aa, unidentified
  REGION 1..1352: note = Category: MG91 effectors
  REGION 1..1352: note = Description: MG91-345 effector
  source 1..1352: note = uncultivated organism sequence
MTAFKYYLGLDMGTNSVGWAATDPEYRLLKAKGKDLWGIREFNEASGAVERRTHRISRRRKQREQVRIGILKDYFHDAICEVDPSFFQRLENSKYHEEDKDVEVRYKNNIFNDSNYTDKDYFNEYPTIYHLRNELISSTEKHDVRLVFLALLNMFKHRGHFLNAGLGENNGESNIDNAYFELTELLSELTEYHLSQDIDCKQIEAILSRRDMSRTHKAEELAGVLHVDLKNKPYKELIRGLCGLKFNACVVFPDVQSEEVTKLDICLSESTFDEKSDEIANIIGEDYFEIIMAMKEMFDIGSLASIMKGHNYLSQARVASYTKHKEDLKLLKEVIKKYCGKKEYDKFFNSDADGSYASYVGSYNSKNKERRVGNKRTSEELYKEIKKLLKDAQKEDENVQKILTSIENETFLPKQLTASNGVIPNQVHAREMKKILSNAENYLPFLTEKDETGLSVSERILKLFTFQIPYYVGPTSENSGKNGGNGWVVRREDGQVLPWNIDEKIDMKATSEAFISRMVRRCTYISGEQVLPKASLEYQSYCVLNEINNIKIDGERISVELKQDIYKAVFQKGKKVTKKQLCKYLHTRGIIETEEQVTGVDVSINNALTTYGKFKPIFGEDISKDSVQKMIEDIVFWCTVYGDSKKFLKDRIEEKYGNKLSEEQIKRILGFKFKDWGNLSKKFLELNGADTSTGESISIIRALWNNNLNLMELINSSLYNYKECLAEYQNTMLKTLSEIEAEDLNEYYFSAPVRRMIWQTILVIKELVKVLGCEPERIFVEMTRRPDEHKTRTSSRRNKFEELYKKVKDETTDWMQVIANAEEDGKIRSKKMYLYLTQKGRCMYTGKHIELDDLFDNNLYDIDHIYPRHFVKDDNIDNNLVLVCKEKNAHKSDHYPIEEEIFLSQKKMWLELRKSGFITEEKYNRLMGRSPFSDEKKAGFIARQLVETSQGTKGVANILRQLLPGSKIVYAKASNVSEFRHTRDDIPKSRLVNDFHHAHDAYLNIVVGNVYYVKFTQNPLNFIKKDYDKYKEDYNLSKMFDWDVKRNGEVAWIAQRKDGEAGTITTVKKMLSRNTPLMTRYSFEGKGGLANETLYSAKKAKGEGYIPFKSSDDKMQDVTKYGGFTKVTGAYFFLVEHTEKKKRIRTIESVPVYLAQKIEQNPDELKKYCEEILGLVDADIRLKKIKIGSLIKRNGYFCYITGKTGDRLSVRNAVNLCLKNEWIKYISKLEKVKEKDTVDEIITKEKNEVLYSELIQKFKHGIFSKRPNPVEDKLEKGSEKFSNLSIKEQCAVLCQILQLAAVLGSECDMTLLGESAHCGKMLISKKIGDEEIYLLNQSVTGLYEKKINLHTV

SEQ ID NO: 3154 - protein, 1359 aa, unidentified
  REGION 1..1359: note = Category: MG91 effectors
  REGION 1..1359: note = Description: MG91-346 effector
  source 1..1359: note = uncultivated organism sequence
MRETGKDYYLGLDMGTNSVGWAVTDENYVLMRAKGKDLWGIREFDEALTAVDRRTHRVARRRRQRETARIGLLKEYFHDAIAEVDPDFYQRLDNSKYHEEDKDSAVKGKNGIFNDANYNDKDYFKQYPTIFHLRKELIESTEKHDVRLVYLALLNMFKHRGHFLNAGLSTESENTMDTAYHNFVETAAQTIECNFMETVDIEKIKEILGSRDYSRSKKAELVAQILHVDSKNKVQMACIKCICGLKVTAAAIFGDKMAADEEKKTDICFSDFGYDEKVPVILEIVGEENFELVLAMQEIYDIGSLAGIMKDSLYLSMARVKEYEQHGKDLRILKGVVKKYGTKEEYDTLFRTMEEGTYSAYVNSVNTKKKSRRDVKKRTRDEFYGRLKKIISKMPQNDSDVLYIKDKMEKEAFLPKQLTASNGVIPNQIHAREMKKILQNAEIYLPFLKEKDTSGLTVSERILKLFSFQIPYYVGPVSEKSKLNGGNGWVVRKEEGTVLPWNIEEKIDMTATSREFVERMVRRCSYLSDERVLPKGSLLYERFCVLNEINAIKVDGVKIPVEIKQDLYSKYFKKGKKVTKKKIAEFLIARGVIKEDQTELISGIDIAVNSTLSTYAKFYAIFGEKMEQDSYKKMVEQIVEWCTIYGDAKKFLEQKIKECYGNILTQEEIKRITGFKFRDWGRLSKEFLELSGCSKATGEVMPLISMMWETNDNLMELLDDNYYTYREALEEKQNNAFKLLADIEPEDLDEMYFSAPVKRMVWQTLCIIKELEKVLGKAPKRLFVEMTRNEQKDKKRTDSRKQQFLDLYKNIKDESRDWKELITRADENGTLKSKKMYLYLTQRGRCMYTGHPIDLEDLFKDNRYDIDHIYPRHFVKDDNIMNNLVLVEKEKNAHKSDNYPLEEEIYKKQLPMWKDLHQRKLITDEKFKRLTGRNEFTDEQKAGFIARQLVETSQGTKGVTTILERALPDTKIVYAKASNVSEFRQKRDLLKSRVVNDFHHAQDAYLNIVVGNVYFVKFTQNPLHFIKAEYDKNKAQYEYNLSRMFDRDVRRGNETAWIGCKKGEEAGTILTVKKMMAKNTPMLTRLSFEGKGGLADQTLYSAEKAKGNGYIPLKTSDSKMQDVTKYGGFNSVSTAYFFLVEHELKGKKVRTLETVPIIWRDRIEKDETMLLKYCTDVLELKNPSIRVKKIKLQSYIKKDGYYMYITGKTNKQITTKNAVELCVNQRWIDYIKIIEKTVEKKKEECEEIDYDKNVEFYDLLLTKHTQEIFSNRPNPVGAKLKQGRDKFVSLTLLEQCRVLYEILQLSIIGNTRADLQLIGGAAISGVMLLSKNITDSKEFILINQSVTGLFEQKVDLLTV

SEQ ID NO: 3155 - protein, 1359 aa, unidentified
  REGION 1..1359: note = Category: MG91 effectors
  REGION 1..1359: note = Description: MG91-347 effector
  source 1..1359: note = uncultivated organism sequence
MLNTPYYLGLDMGTNSVGWAVTDKNYNLLRAKGKDLWGIREFSDSATSVDRRSYRIRRRRRQREQARIGLLKYYFNDSIIAKDPSFFQRLENSKYHLEDKDEAVKYKFNIFNDKTYTDIDYYTQYPTIYHLRKELLESSEPHDVRLVYLALLNMFKHRGHFLNAEIGDVAEERKLKDAYIDFCSCVSELTNESFNLDIDYSAVEEILSSRDISRTKKSEALASILNIDVKNKKYKEYVKAICGLKVNAYTLFSEQLSDEVKRIDICVSDASFDTKREDYISILGEDLFQIILYIKEIYDIGSLAGILKGYSYLSFARVATYEKHKSDLRKLKDCIRKYCSKEDYNQFFNSDAAGFYASYIGSFNSGKKQRRVGKNTTSEDLYKEIKKILKNADKNDPEIIDIFSSIDTESFLPKQLTASNGVIPNQVHYKEMAKILSNAESYLPFLREKNESNLSVSERILQIYKFQIPYYIGPVTEKSHRDGGNGWVIRKSNGRVLPWNINEKIDVKATSEAFISRMVRRCTYMNGAQVLPKASLEYESFRVLNEINNLRIDGERIPVDLKQAIYIDIFQKGKKITADILHKYLFNKGYIQSSEQVTGIDININNSLSTYGKFKVIFGEDIKLDSVQHMIEDIVFWCTVYGDSKKFLQEQIEEKYSDKISKEQLKRILGFKFKDWGSLSKEFFELKATDKSTGENISIIRALWENNLNLMELINSSKFNFKERLEEYRITSLKTLSDFEPEDLREYYFSAPVRKMIWQTMLVIKELVHVLGHEPERIFIEIPRDKDPSIGRTISRKKKFEELYKNVKDESVDWMNVIEHADDSGSLRSKKMYLYLTQKGRCMYTGEHIELSDLFNKSLYDIDHIYPRHFVKDDNIDNNLVLVKREKNAHKSDNYPLEAEIFNNQKKMWAQLRKEDFINEEKYKRLMGRNPFTDEQKAGFIARQLVETQQGTKGVAELLQQLLPNSKIVYTKAGNVSDFRHSREIPKSRLINDFHHAHDAYLSIVVGNVYYVKFTQNPINFIKNAYNKDSSKNNYNLTRMFDWDVKRRDEVAWIAQNKNGTVGTIAIVKKMLKRNTPLMTRLSYEGKGGLTKETLYSAEKAKGEGYIPFKSSDKKMQDVTKYGGFTSVKGAYFFLVEHDEKKKQIRTIESVPLYLADKIEKDPAELERYCQKLGLVNYNIRVRKIKIGTLIKRNGYFAYLTGKTGKQLILRNATNLCLDSKWGTYIKKIEKYKDTGVLDNTLDTDTNIKLYNELLDKFTTGIYGKRPNPIGDKMLSAKNTFTSFTLDNQCNLIYQILQLSKILGFETDLSLLHTNKKSDKPTREGGMQISKKVSNTTSMYLINQSPTGLFEKQIDLLTV

SEQ ID NO: 3156 - protein, 1359 aa, unidentified
  REGION 1..1359: note = Category: MG91 effectors
  REGION 1..1359: note = Description: MG91-348 effector
  source 1..1359: note = uncultivated organism sequence
MRETGKDYYLGLDMGTNSVGWAVTDENYVLMRAKGKDLWGIREFDEALTAVDRRTHRVARRRRQREIARIGLLKEYFHDAIAEVDPDFYQRLDNSKYHEEDKDSAVKGKNGIFNDANYNDKDYFKQYPTIFHLRKELIESTEKHDVRLVYLALLNMFKHRGHFLNAGLSTESENTMDTAYHNFVETAAQTIECNFMETVDIEKIKEILGSRDYSRSKKAELVAQILHVDSKNKVQMACIKCICGLKVTAAAIFGDKMAADEEKKTDICFSDFGYDEKVPVILEIVGEENFELVLAMQEIYDIGSLAGIMKDSLYLSMARVKEYEQHGKDLRILKGVVKKYGTKEEYDTLFRTMEEGTYSAYVNSVNTKKKSRRDVKKRTRDEFYGRLKKIISKMPQNDSDVLYIKDKMEKEAFLPKQLTASNGVIPNQIHAREMKKILQNAEIYLPFLKEKDTSGLTVSERILKLFSFQIPYYVGPVSEKSKLNGGNGWVVRKEEGTVLPWNIEEKIDMTATSREFVERMVRRCSYLSDERVLPKGSLLYERFCVLNEINAIKVDGVKIPVEIKQDLYSKYFKKGKKVTKKKIAEFLIARGVIKEDQTELISGIDIAVNSTLSTYAKFYAIFGEKMEQDSYKKMVEQIVEWCTIYGDAKKFLEQKIKECYGNVLTQEEIKRITGFKFRDWGRLSKEFLELSGCSKATGEVMPLISMMWETNDNLMELLDDNYYTYREALEEKQNNAFKLLADIEPEDLDEMYFSAPVKRMVWQTLCIIKELEKVLGKAPKRLFVEMTRNEQKDKKRTDSRKQQFLDLYKNIKDESRDWKELITRADENGTLKSKKMYLYLTQMGRCMYTGHPIDLEDLFKDNRYDIDHIYPRHFVKDDNIMNNLVLVEKEKNAHKSDNYPLEEEIYKKQLPMWKDLHQRKLITDEKFKRLTGRNEFTDEQKAGFIARQLVETSQGTKGVTTILERALPDTKIVYAKASNVSEFRQKRDLLKSRVVNDFHHAQDAYLNIVVGNVYFVKFTQNPLHFIKAEYDKNKAQYEYNLSRMFDRDVRRGNETAWIGCKKGEEAGTILTVKKMMAKNTPMLTRLSFEGKGGLADQTLYSAEKAKGNGYIPLKTSDSKMQDVTKYGGFNSVSTAYFFLVEHELKGKKVRTLETVPIIWRDRIEKDETMLLKYCTDVLELKNPSIRVKKIKLQSYIKKDGYYMYITGKTNKQITTKNAVELCVNQRWIDYIKIIEKTVEKKKEECEEIDYDKNVEFYDLLLTKHTQEIFSNRPNPVGAKLKQGRDKFVSLTLLEQCRVLYEILQLSIIGNTRADLQLIGGAAISGVMLLSKNITDSKEFILINQSVTGLFEQKVDLLTV

SEQ ID NO: 3157 - protein, 1359 aa, unidentified
  REGION 1..1359: note = Category: MG91 effectors
  REGION 1..1359: note = Description: MG91-349 effector
  source 1..1359: note = uncultivated organism sequence
MQEKPYYLGLDMGTNSVGWAVTDQHYNLLKAKGKDLWGIREFIEADTSVERRTHRISRRRRQREQARIGLLNDYFHDAIIAIDPSFFQRLENSKYHLEDKDQNVRYKYNIFNDPDYTDADYYTQYPTIYHLRKELLENPKPHDVRLVYLALLNMFKHRGHFLNSGISDGNNERSLKDAYINFAISVSELTEDYFNQDVDYSTIEEILSSRDLNRTKKAEELSTVLGIDFKNKKYKEYLRAICGLKINAYTLFSDQLPDDTTKIDLCVSDASFDEKSEELVSLIGEDLFQIILNIKEIYDIGSLAGILKGYTYLSQARVAAYDKHKHDLKLLKSSIKKYCTKEEYNNFFNSDADGSYASYIGSFNSGNKERRVGSKRTSEDLYKEIKKLLKGANKSDPAINEIFTSIETESFLPKQLTASNGIIPNQVHSKEMARILTNAENYLPFLKETDENNLSISNRILQLYKFQIPYYIGPVTEKSQRDGGSGWVIRKDNGRVFPWNIEEKIDVKATSEAFISRMVRRCTYMNGKQVLPKASLEYESFRVLNEINNLRIDGERIPVTLKQDIYTDLFQKGKKVTKKQLCNYLATRGLIESSEQVTGIDIAINNSLSTYGKFKAIFGEDIELDHIQHMIEDIVFWCTVYGDSKQFLKEQIEDKYKGKLSPEQMKRILGFKFKDWGNLSKEFFELKGADKSTGEAVSIIRALWENNLNLMELINSPEFDFKEQLADYEANSLKTLSDFEPEDLNEYYFSAPVRRMIWQTTLIIKELVHVLGKEPARIFIEMTREKDASRGRTLSRKKKFEDLYKNVKDENTDWAKVIEHADESGTIRSKKMYLYLTQKGRCMYTGNHIELSDLFNDNLYDIDHIYPRHFVKDDNIDNNLVLVTKEKNAHKSDNYPLEAEIFNKQRNMWTQLRKEGFISEEKYNRLMGRNAFTDEQKAGFIARQLVETSQGTKGVAELFHQLLPNSKIVYAKAGNVSDFRRNRELPKSRLVNDFHHAHDAYLNIVVGNVYYVKFTQNPINYIKNSYNKDMNKNNYNLSRMFDWDVKRGDEVAWIAQKQDGAAGTISTVKKMLSKNTPLMTRLSYEGKGALANETLYSAEKAKGEGYIPFKSSDAKIQDVTKYGGFTSVTGAYFFLVEHDEKKKRIRTIESVPLYLADKIDKNSSELERYCDKLGLVNYDIRVRKIKIGSLLNRNGYFAYLTGKTGKQLILRNATNLCLDKKWTIYIKKIEKYKETNLLDSIITSETMVNLYNELLNKFTVGIYGRRPNPIGEKMDSAKNTFTSYTLDNQCNLIYQILQLSKILGFETDLSLLRTNKQSSKPTREGGMQISKKIDNTTSMYLINQSPTGLFETKIDLQTI

SEQ ID NO: 3158 - protein, 1352 aa, unidentified
  REGION 1..1352: note = Category: MG91 effectors
  REGION 1..1352: note = Description: MG91-350 effector
  source 1..1352: note = uncultivated organism sequence
MLEKPYYLGLDMGTNSVGWAVTDQQYNLLKAKGKDLWGIREFAEADTSVERRTHRISRRRRQREQARIGLLNDYFHDAIIAIDPSFFQRLENSKYHLEDKDQNVRYKYNIFNDPDYTDADYYTQYPTIYHLRKELLENPKPHDVRLVYLALLNMFKHRGHFLNSGISDGNNERSLKDAYINFAISVSELTEDYFNQEVNYSTIEGILSSRDLNRTKKAEELSTVLGIDFKNKKYKEYLRAICGLKINAYTLFSDQLPDDTTKIDLCVSDASFDEKSEELVSLIGEDLFQIILNIKEIYDIGSLAGILKGYTYLSQARVAAYDKHKHDLKLLKSSIKKYCTKEEYNNFFNSDADGSYASYIGSFNSGNKERRVGSKRTSEDLYKEIKKLLKGANKSDPAINEIFTSIETESFLPKQLTASNGIIPNQVHSKEMARILTNAENYLPFLKETDENNLSISNRILQLYKFQIPYYIGPVTEKSQRDGGNGWVIRKDNGRVFPWNIEEKIDVKATSEAFISRMVRRCTYMNGKQVLPKASLEYESFRVLNEINNLRIDGERIPVTLKQDIYTDLFQKGKKVTKKQLCNYLATRGLIESSEQVTGIDIAINNSLSTYGKFKAILGEDIKLDHIQHMIEDIVFWCTVYGDSKQFLKEQIEDKYKGKLSPEQMKRILGFKFKDWGNLSKEFFELKGADKSTGEAVSIIRALWENNLNLMELINSPEFDFKEQLADYEANSLKTLSDFEPEDLNEYYFSAPVRRMIWQTTLIIKELVHVLGEEPARIFIEMTREKDASRGRTLSRKKKFEDLYKNVKDENTDWAKVIEHADESGTIRSKKMYLYLTQKGRCMYTGNHIELSDLFNDNLYDIDHIYPRHFVKDDNIDNNLVLVTKEKNAHKSDNYPLEAEIFNKQRNMWTQLRKEGFISEEKYNRLMGRNAFTDEQKAGFIARQLVETSQGTKGVAELFHQLLPNSKIVYAKAGNVSDFRRNRELPKSRLVNDFHHAHDAYLNIVVGNVYYVKFTQNPINYIKNSYNKDMNKNNYNLSRMFDWDVKRGDEVAWVAQKQDAAAGTISTVKKMLSKNTPLMTRLSYEGKGALANETLYSAEKAKGEGYIPFKSSDAKIQDVTKYGGFTSVTGAYFFLVEHDEKKKRIRTIESVPLYLADKIDKDSSELERYCDKLGLVNYDVRVRKIKIGSLIKYNGYFCYITGKTGYRLIVRNATNLCLASNWRKYIKKIEKYKETTIIDNVITAEENIKLYNELLNKFTVGIFGRRPNPIGEKMDSARDKFASLSIENQCLALYQILQLTAILGNESDLQLIGASTHAGKMLISKKIGTDEIYLINQSPTGLFETKIDLQTI

SEQ ID NO: 3159 - protein, 1349 aa, unidentified
  REGION 1..1349: note = Category: MG91 effectors
  REGION 1..1349: note = Description: MG91-351 effector
  source 1..1349: note = uncultivated organism sequence
MKNYFLGLDMGTNSVGWAVTDDNYNILRAKGKDLWGIREFESANTAEERRMHRTARRNRQREVVRRGYLQSYFADAINDVDPNFFARMQNSKYYLEDKAPEARVKDVLFNDKDYHDKDYYEEYPTIYHLRMDLINNPNPHDVRLVYLAIANIFKHRGHFLNQGLGESNGESNMQIAYDRLISMLSSNYNIELPELDADQITDILKDRRYSKTVKSEKLKELIPYHDVENKKFYSEIINAISGRKVKGKNLFPELEGEDNIDFSFAESSFDDNLSEFVSKIGEERYALIEILREIYSIGSLAEIMHGCRYLSESRVKDYDKHHSDLKKLKNVIKKYCDKTVYDEIFRSDDNGTYSAYVNSVNSSTSGKIRRNMKDRKRDDFYSKIKKIVGGMPKEDSDVQDILSDIDRETFMPKMLTSDNGIIPNGVHARELSAILHNAEQYLDFLRAEDENGLSVSDKILQLFKFRIPYYIGPVANYNGKGNGWAVRKANGPVLPWNISEKIDIKATKEKFIERLIRDCTYISGEKVLPKGSMLYERFMVLNEINNIRINDERIPVELKQSIYTDLFERGKRVTKNQLFKYLNNKGLVQDKEQITGLNDQIAGTLTSYGRFYQIFGEKLKEDSIKAQVEEIIKLCTIYGDDKKELANVLRDTYGNLLSDDEIRRICGYKYKDWGRLSRAFLELEGCNKQTGEITTLIQELWNTSYNLMELLHSPDYTFSETLDKQTRSSEKLLSEITPEDLNEFYFSAPVRRMVWQTILLIREITHIMGNEPGKIFIEMTRTDEEKGENGRKQSRKNELTELYKSVKDDLQNWKELIAQEDESGRLRSKKMYLYILQMGRDMYTGEPIDLDNLFNDNIYDIDHIYPRQFVKDNNLQNNMVLVNKQANSRKTNNYPLDASIASNSKVQDLWKTLHEHHLMNDEKYHRLTRRTPFSDEDKAGFIARQMVETGQATKGVADLLKELMPESRIVYSKAGNVSDFRRDYGIVKSRIVNDFHHAHDAYLNIVVGNVYLTKFTDNPLNFVKKEYSRDPEKNHYHLDKMFIWDVKRGNYTAWVKGKEGTISTVKKTLSKNSPILTRMTFEAHGQISEQTLIGKKTAKAGVYLPLKGNDARMTVEKYGGFSSAKGAYYCLVEHGTKAKRIRSIETVPIYKAAEIGDSKDELTKYLGNELGLVNPDVRIAKILMQSLFKRNGYFVYLTGRSGNQLILQNAVNLVLAYDEISYIHKLEKYSLSSIADDLTSEKNVGLYDVLSNKFNGSIFKDRPNPVGKLLISGRDKFLDLNLEEQCYVLIQILNLSKIGVAKADLKLIGGSSQSGMMKMSKTLKPDDRMELIYQSVSGIFEKRVDLLKV

SEQ ID NO: 3160 - protein, 1358 aa, unidentified
  REGION 1..1358: note = Category: MG91 effectors
  REGION 1..1358: note = Description: MG91-352 effector
  source 1..1358: note = uncultivated organism sequence
MEKEYYLGLDMGTNSVGWAVTDDAYNLIRFKGKDMWGIREFDEANPAVERRTHRTSRRREQRNAVRMGLIRSYFADEIQKVDSNFYQRLDNSFFHVEDKQDNVKDKNGIFNDKNYKDADYYKQYPTIFHLRKELIEDASQKDVRLVYLAVANMFKHRGHFLLSGIGSESSKQTITDLYNQVSGLITEEYGISLKTDIAGTDFEQVLCSREYSRTRKSEKVCEILEIKNSDKLKKAFVKSMCGLSVKITDVIDDTFTEISDEDKKITFSFVDSDYDEKAGVLEEKLGTDVYDIISKLKEIHDKAQVAEIMKNYQYLSFARVADYEKHKKDLKILKRVVKKYFEPTVYDKLFRSGENGTYSAYVNSFNSGEKSRRNYKERKQEDLYNSIKKLLKSIDNVCDTDIEYIKNEIEKENFLPKQLTFKNGVIPNQIHASELKAILKNAEKYLPFLNEKDESGYTVSERILMLFSFQIPYYVGPVSSNSNGWVKRLEPGQVLPWNIDKKIDLKETSEQFIQRMVRNCTYIAGEKVLPKASLLYENFKVLNEINNLSINGERIAVALKQDLYNTLFLKGKRVTRKQIFNYFHSRGLVEEDSQISGIDIAVNNSLSTYGKFLPLFGEHLKEDKYKKMVDDIVFWCTVYGDSRKFLREQLEEKYSDVLDENQIKRITGMKFKDWGNLSKEFLELLGCCKSTGEMIPLIRAMWETNYNLMELLHSEEFTYSEELEEKQGKIEKVLSEYTIDDLNEEYFSAPVKRMVWQTLLIIKEIEKIMKCPPTRIFVEMTRKDDEKGDNGRKSSRKDQLLALYKKIQSEDKEWKKEMSSRIEDYDKNGALRSKKLYLYFIQKGLDMYTGKPIDLDNLMSANSNYDIDHIYPRHFVKDDNINNNLVLASKPANAEKSDIYPIKDSIYQKMKYTWKVLRDEGLITEEKYKRLTGRNPFTDEQKAGFIARQLVETGQGTKGVADLLTALLPDTKLVYSKAGNVSDFRKRYDIHKSRLINDFHHAHDAYLNIVVGNIYFTKFTSNPLNYIRKECSSKDNKYQYNLGNMYKWDVKRDGKTAWIAAKEGETGTIATVKKILSRNTPTLTRLTIEGHGGIADATLYSHKKAKQDAYIPLKSSDARMADVTKYGGYSSVTTAYLFLVEHEIKGKKIRTLETVPLYLKDRLENSKEKLEEYCRETLGYTNPSVRMKKIKLQSLIKLNGYYMQISGRTGNRFTLRNYVQLCLNGKWVDYIHKLEKYQDKGFIDNVITDEKNVELYNVLCEKHNVGIYTMRPNPVGDRIKNGYDKFVNLTTEEQIKLLIEIIKLTCVGIVSADLTLIGGAAISGKMLMSKNITDANECILINQSVTGLYENRIDLLRV

SEQ ID NO: 3161 - protein, 1358 aa, unidentified
  REGION 1..1358: note = Category: MG91 effectors
  REGION 1..1358: note = Description: MG91-353 effector
  source 1..1358: note = uncultivated organism sequence
MEKEYYLGLDMGTNSVGWAVTDDAYNLIRFKGKDMWGIREFDEANPAVERRTHRTSRRREQRNAVRMGLIRSYFADEIQKVDSNFYQRLDNSFFHVEDKQDNVKDKNGIFNDKNYKDANYYKQYPTIFHLRKELIEDVSQKDVRLVYLAVANMFKHRGHFLLSGIGSESSKQTITDLYNQVSGLITEEYGISLKTDIAGTDFEQVLCSREYSRTRKSEKVCEILEIKNSDKLKKAFVKSMCGLSVKITDVIDDTFTEISDEDKKITFSFVDSDYDEKAGVLEEKLGTDVYDIISKLKEIHDKAQVAEIMKNYQYLSFARVADYEKHKKDLKILKRVVKKYFEPTVYDKLFRSGENGTYSAYVNSFNSGEKSRRNYKERKQEDLYNSIKKLLKSIDNVCDTDIEYIKNEIEKENFLPKQLTFKNGVIPNQIHVSELKAILKNAEKYLPFLNEKDESGYTVSERILMLFSFQIPYYVGPVSPNSNGWVKRLEPGQVLPWNIDKKIDLKETSEQFIQRMVRNCTYIAGEKVLPKASLLYENFKVLNEINNLSINGERITVNLKQDLYNTLFLKGKRVTRKQIFNYFHSRGLVEEDSQISGIDIAVNNSLSTYGKFLPLFGEHLKEDKYKKMVDDIVFWCTVYGDSRKFLREQLEEKYSDVLDENQIKRITGMKFKDWGNLSKEFLELSGCCKSTGEVMPLIRAMWETNYNLMELLHSEEFTYSEELEEKQGKIEKVLSEYTIDDLNEEYFSAPVKRMVWQTLLIIKEIEKIMKCPPTRIFVEMTRKDDEKGDNGRKSSRKDQLLALYKKIQSEDKEWKKEMSSRIEDYDKKGALRSKKLYLYFIQKGLDMYTGKPIDLDNLMSANSNYDIDHIYPRHFVKDDNINNNLVLASKPANAEKSDIYPIKDSIYQKMKYTWKVLRDEGLITEEKYKRLTGRNPFTDEQKAGFIARQLVETGQGTKGVADLLTALLPDTKLVYSKAGNVSGFRKRYDIPKSRLINDFHHAHDAYLNIVVGNIYFTKFTSNPLNYIRKECSSKDNKYQYNLGNMYKWDVKRDGKTAWIAAKEGETGTIATVKKILSRNTPTLTRLTIEGHGGIADATLYSHKKAKQDAYIPLKSSDARMADVTKYGGYSSVTTAYLFLVEHEIKGKKIRTLETVPLYLKDRLENSKEKLEEYCRETLGYTNPSVRMKKIKLQSLIKLNGYYMQISGRTGNRFTLRNYVQLCLNGKWVDYIHKLEKYQDKGFIDNVITDEKNVELYNVLCEKHNVGIYTMRPNPVGDRIKNGYDKFVNLTIEEQIKLLIEIIKLTCVGIVSADLTLIGGASISGKMLISKNITDAKECLLINQSVTGLYENRIDLLRV

SEQ ID NO: 3162 - protein, 1358 aa, unidentified
  REGION 1..1358: note = Category: MG91 effectors
  REGION 1..1358: note = Description: MG91-354 effector
  source 1..1358: note = uncultivated organism sequence
MEKEYYLGLDMGTNSVGWAVTDDAYNLIRFKGKDMWGIREFDEANPAVERRTHRTSRRREQRNAVRMGLIRSYFADEIQKVDSNFYQRLDNSFFHVEDKQDNVKDKNGIFNDKNYKDADYYKQYPTIFHLRKELIEDASQKDVRLVYLAVANMFKHRGHFLLSGIGSESSKQTITDLYNQVSGLITEEYGISLKTDIAGTDFEQVLCSREYSRTRKSEKVCEILEIKNSDKLKKAFVKSMCGLSVKITDIIDDTFTEISDEDKKITFSFVDSDYDEKAGVLEEKLGTDVYDIISKLKEIHDKAQVAEIMKNYQYLSFARVADYEKHKKDLKILKRVVKKHFEPTVYDKLFRSEENGTYSAYVNSFNSEEKSRRNYKERKQEDLYNSIKKLLKSVDNVDDTDIEYIKNEMDKENFLPKQLTFKNGVIPNQIHASELKAILKNAEKYLPFLNEKDESGYTVSERILKLFSFQIPYYVGPVSSNSNGWVKRLESGQVLPWNIDKKIDLKETSEQFIQRMVRNCTYIAGEKVLPKASLLYENFKVLNEINNLSINDERITVNLKQDLYNTLFLKGKRVTRKQIFNYFHSRGLVEEDSQISGIDIAVNNSLSTYGKFLPLFGEHLKEDKYKKMVDDIVFWCTVYGDSRKFLREQLEEKYSDVLDENQIKRITGMKFKDWGNLSKEFLELSGCCKSTGEMIPLIRAMWETNYNLMELLHSEEFTYSEELEEKQGKIEKVLSEYTIDDLNEEYFSAPVKRMVWQTLLIIKEIEKIMKCPPTRIFVEMTRKDDEKGDNGRKSSRKDQLLALYKKIQSEDKEWKKEMSSRIEDYDKNGALRSKKLYLYFIQKGLDMYTGKPIDLDNLMSANSNYDIDHIYPRHFVKDDNINNNLVLASKPANAEKSDIYPIKDSIYQKMKYTWKVLRDEGLITEEKYKRLTGRNPFTDEQKAGFIARQLVETGQGTKGVADLLTALLPDTKLVYSKAGNVSDFRKRYDIPKSRLINDFHHAHDAYLNIVVGNIYFTKFTSNPLNYIRKECSSKDNKYQYNLGNMYKWDVKRDGKTAWIAAKEGETGTIATVKKILSRNTPTLTRLTIEGHGGIADATLYSHKKAKQDAYIPLKSSDARMADVTKYGGYSSVTTAYLFLVEHEIKGKKIRTLETVPLYLKDRLENSKEKLEEYCRETLGYTNPSVRMKKIKLQSLIKLNGYYMQISGRTGNRFTLRNYVQLCLNGKWVDYIHKLEKYQDKGFIDNVITDEKNVELYNVLCEKHSVGIFTLRPNPVGDKIKKGYDKFVNLTTEEQIKLLIEIIKLTCVGIVSANLTLIGGASISGKMLISKNITDAKECLLINQSVTGLYENRIDLLRV

SEQ ID NO: 3163 - protein, 1358 aa, unidentified
  REGION 1..1358: note = Category: MG91 effectors
  REGION 1..1358: note = Description: MG91-355 effector
  source 1..1358: note = uncultivated organism sequence
MEKEYYLGLDMGTNSVGWAVTDDAYNLIRFKGKDMWGIREFDEANPAVERRTHRTSRRREQRNAVRMGLIRSYFADEIQKVDSNFYQRLDNSFFYVEDKQDNVKDKNGIFNDKNYKDANYYKQYPTIFHLRKELIEDASQKDVRLVYLAVANMFKHRGHFLLSGIGSESSKQTITDLYNQVSGLITEEYGISLKTDIAGTDFEQVLCSREYSRTRKSEKVCEILEIKNSDKLKKAFVKSMCGLSVKITDIIDDTFTEISDEDKKITFSFVDSDYDEKAGVLEEKLGTDVYDIISKLKEIHDKAQVAEIMKNYQYLSFARVADYEKHKKDLKILKRVVKKYFEPTVYDKLFRSEENGTYSAYVNSFNSEEKSRRNYKERKQEDLYNSIKKLLKSVDNVDDTDIEYIKNEMDKENFLPKQLTFKNGVIPNQIHASELKAILKNAEKYLPFLNEKDESGYTVSERILMLFSFQIPYYVGPVSSNSNGWVKRLEPGQVLPWNIDKKIDLKETSEQFIQRMVRNCTYIAGEKVLPKASLLYENFKVLNEINNLSINGERITVNLKQDLYNTLFLKGKRVTRKQIFNYFHSRGLVEEDSQISGIDIAVNNSLSTYGKFLPLFGEHLKEDKYKKMVDDIVFWCTVYGDSRKFLREQLEEKYSDVLDENQIKRITGMKFKDWGNLSKEFLELSGCCKSTGEVMPLIRAMWETNYNLMELLHSEEFTYSEELEEKQGKIEKVLSEYTIDDLNEEYFSAPVKRMVWQTLLIIKEIEKIMKCPPTRIFVEMTRKDDEKGDNGRKSSRKDQLLALYKKIQSEDKEWKKEMSSRIEDYDKNGALRSKKLYLYFIQKGLDMYTGKPIDLDNLMSANSNYDIDHIYPRHFVKDDNINNNLVLASKPANAEKSDIYPIKDSIYQKMKYTWKVLRDEGLITEEKYKRLTGRNPFTDEQKAGFIARQLVETGQGTKGVADLLTALLPDTKLVYSKAGNVSDFRKRYDIPKSRLINDFHHAHDAYLNIVVGNIYFTKFTSNPLNYIRKECSSKDNKYQYNLGNMYKWDVKRDGKTAWVAPEEGETGTLATVKKMLSRNTPILTRLTIEGHGGIADATLYSHKKAKQDTYIPLKSSDARMADVTKYGGYSSVTTAYLFLVEHEIKGKKIRTLETVPLYLKDRLENSKEKLEEYCRETLGYTNPSVRMKKIKLQSLIKLNGYYMQISGKTNKQFTVRNYVQFCLNSKWVDYIHKLEKYQDKGVIDDAITDEKNVELYNVLCEKHSVGIFTLRPNPVGDKIKKGYDKFVNLTTEEQIKLLIEIIKLTCVGIVSANLTLIGGASISGKMLISKNITDAKECLLINQSVTGLYENRIDLLRV

SEQ ID NO: 3164 - protein, 1352 aa, unidentified
  REGION 1..1352: note = Category: MG91 effectors
  REGION 1..1352: note = Description: MG91-356 effector
  source 1..1352: note = uncultivated organism sequence
MTAFKYYLGLDMGTNSVGWAATDPEYRLLKAKGKDLWGIREFNEASGAVERRTHRISRRRRQREQVRIGILKDYFHDAICEVDPSFFRRLENSKYHEEDKDVEVRYKNNIFNDGNYTDKDYFNEYPTIYHLRNELISSTEKHDVRLVFLALLNMFKHRGHFLNAGLGENNGESNIDNAYFELTELLSELTEYHLSQDIDCKQIEAILSRRDMSRTHKAEELAGVLHVDLKNKPYKELIRGLCGLKFNACVVFPDVQSEEVTKLDICLSESSFDEKSDEIANIIGEDYFEIIMAMKEMFDIGSLASIMKGHNYLSQARVASYTKHKEDLKLLKEVIKKYCGKKEYDKFFNSDADGSYASYVGSYNSKNKERRVGNKRTSEELYKEIKKLLKDAPKEDENVQKILTSIENETFLPKQLTASNGVIPNQVHAREMKKILSNAENYLPFLTEKDETGLSVSERILKLFTFQIPYYVGPTSENSGKNGGNGWVVRREDGQVLPWNIDEKIDMKATSEAFISRMVRRCTYISGEQVLPKASLEYQSYCVLNEINNIKIDGERISVELKQDIYKAVFQKGKKVTKKQLCKYLHTRGIIETEEQVTGVDVSINNALTTYGKFKPIFGEDISKDSVQKMIEDIVFWCTVYGDSKKFLKDRIEEKYGNKLSEEQIKRILGFKFKDWGNLSKKFLELNGADTSTGESISIIRALWNNNLNLMELINSSLYNYKECLAEYQNTMLKTLSEIEAEDLNEYYFSAPVRRIIWQTILVIKELVKVLGCEPERIFVEMTRRPDEHKTRTSSRRNKFEELYKKVKDEATDWMQVIAKAEEDGKIRSKKMYLYLTQKGRCMYTGKHIELDDLFDKNLYDIDHIYPRHFVKDDNIDNNLVLVCKEKNAHKSDHYPIEEEIFLSQKKMWLELRKSGFITEEKYNRLMGRSPFSDEQKAGFIARQLVETSQGTKGVANILRQLLPGSKIVYAKASNVSEFRHTRDDIPKSRLVNDFHHAHDAYLNIVVGNVYYVKFTQNPLNFIKKDYDKYKEDYNLSKMFDWDVKRNGEVAWIAQRKDGEAGTITTVKRMLSRNTPLMTRYSFEGKGGLANETLCSAKKAKGEGYIPFKSSDDKMQDVTKYGGFTKVTGAYFFLVEHTEKKKRIRTIESVPVYLAQKIEQNPDELKKYCKEILGLVDADIRLKKIKIGSLIKRNGYFCYITGKTGNRLSVRNAVNLCLKNEWIKYISKLEKVKEKDAVDEIITKEKNEVLYSELIQKFKHGIFSKRPNPVEDKLEKGSEKFSNLSIKEQCAVLCQILQLAAVLGSECDMTLLGESAHCGKMLISKKIGDEEIYLLNQSVTGLYEKKINLHTV

SEQ ID NO: 3165 - protein, 1358 aa, unidentified
  REGION 1..1358: note = Category: MG91 effectors
  REGION 1..1358: note = Description: MG91-357 effector
  source 1..1358: note = uncultivated organism sequence
MEKEYYLGLDMGTNSVGWAVTDDAYNLIRFKGKDMWGIREFDEANPAVERRTHRTSRRREQRNAVRMGLIRSYFADEIQKVDSNFYQRLDNSFFHVEDKQDNVKDKNGIFNDKNYKDADYYKQYPTIFHLRKELIEDASQKDVRLVYLAVANMFKHRGHFLLSGIRSESSKQTITDLYNQVSGLITEEYGISLKTDIAGTDFEQVLCSREYSRTRKSEKVCEILEIKNSDKLKKAFVKSMCGLSVKITDVIDDTFTEISDEDKKITFSFVDSDYDEKAGVLEEKLGTDVYDIISKLKEIHDKAQVAEIMKNYQYLSFARVADYEKHKKDLKILKRVVKKYFEPTVYDKLFRSGENGTYSAYVNSFNSGEKSRRNYKERKQEDLYNSIKKLLKSIDNVCDTDIEYIKNEIEKENFLPKQLTFKNGVIPNQIHASELKAILKNAEKYLPFLNEKDESGYTVSERILMLFSFQIPYYVGPVSPNSNGWVKRLEPGQVLPWNIDKKIDLKETSEQFIQRMVRNCTYIAGEKVLPKASLLYENFKVLNEINNLSINGERIAVALKQDLYNTLFLKGKRVTRKQIFNYFHSRGLVEEDSQISGIDIAVNNSLSTYGKFLPLFGEHLKEDKYKKMVDDIVFWCTVYGDSRKFLREQLEEKYSDVLDENQIKRITGMKFKDWGNLSKEFLELLGCCKSTGEMIPLIRAMWETNYNLMELLHSEEFTYSEELEEKQGKIEKVLSEYTIDDLNEEYFSAPVKRMVWQTLLIIKEIEKIMKCPPTRIFVEMTRKDDEKGDNGRKSSRKDQLLALYKKIQSEDKEWKKEMSSRIEDYDKNGALRSKKLYLYFIQKGLDMYTGKPIDLDNLMSANSNYDIDHIYPRHFVKDDNINNNLVLASKPANAEKSDIYPIKDSIYQKMKYTWKVLRDEGLITEEKYKRLTGRNPFTDEQKAGFIARQLVETGQGTKGVADLLTALLPDTKLVYSKAGNVSDFRKRYDIPKSRLINDFHHAHDAYLNIVVGNIYFTKFTSNPLNYIRKECSSKDNKYQYNLGNMYKWDVKRDGKTAWIAAKEGETGTIATVKKILSRNTPTLTRLTIEGHGGIADATLYSHKKAKQDAYIPLKSSDARMADVTKYGGYSSVTTAYLFLVEHEIKGKKIRTLETVPLYLKDRLENSKEKLEEYCRETLGYTNPSVRMKKIKLQSLIKLNGYYMQISGKTNKQFTVRNYVQFCLNSKWVDYIHKLEKYQDKGVIDDAITDEKNVELYNVLCEKHSVGIFTLRPNPVGDKIKKGYDKFVNLTTEEQIKLLIEIIKLTCVGIVSANLTLIGGAAISGKMLISKNITDAKECLLINQSVTGLYENRIDLLRV

SEQ ID NO: 3166 - protein, 1358 aa, unidentified
  REGION 1..1358: note = Category: MG91 effectors
  REGION 1..1358: note = Description: MG91-358 effector
  source 1..1358: note = uncultivated organism sequence
MEKEYYLGLDMGTNSVGWAVTDDAYNLIRFKGKDMWGIREFDEANPAVERRTHRTSRRREQRNAVRMGLIRSYFADEIQKVDSNFYQRLDNSFFHVEDKQDNVKDKNGIFNDKNYKDADYYKQYPTIFHLRKELIEDASQKDVRLVYLAVANMFKHRGHFLLSGIGSESSKQTITDLYNQVSGLITEEYGISLKTDIAGTDFEQVLCSREYSRTRKSEKVCEILEIKNSDKLKKAFVKSMCGLSVKITDVIDDTFTEISDEDKKITFSFVDSDYDEKAGVLEEKLGTDVYDIISKLKEIHDKAQVAEIMKNYQYLSFARVADYEKHKKDLKILKRVVKKYFEPTVYDKLFRSGENGTYSAYVNSFNSGEKSRRNYKERKQEDLYNSIKKLIKSIDNVCDTDIEYIKNEIEKENFLPKQLTFKNGVIPNQIHASELKAILKNAEKYLPFLNEKDESGYTVSERILMLFSFQIPYYVGPVSPNSNGWVKRLEPGQVLPWNIDKKIDLKETSEQFIQRMVRNCTYIAGEKVLPKASLLYENFKVLNEINNLSINGERIAVALKQDLYNTLFLKGKRVTRKQIFNYFHSRGLVEEDSQISGIDIAVNNSLSTYGKFLPLFGEHLKEDKYKKMVDDIVFWCTVYGDSRKFLREQLEEKYSDVLDENQIKRITGMKFKDWGNLSKEFLELLGCCKSTGEMIPLIRAMWETNYNLMELLHSEEFTYSEELEEKQGKIEKVLSEYTIDDLNEEYFSAPVKRMVWQTLLIIKEIEKIMKCPPTRIFVEMTRKDDEKGDNGRKSSRKDQLLALYKKIQSEDKEWKKEMSSRIEDYDKNGALRSKKLYLYFIQKGLDMYTGKPIDLDNLMSANSNYDIDHIYPRHFVKDDNINNNLVLASKTANAEKSDIYPIKDSIYQKMKYTWKVLRDEGLITEEKYKRLTGRNPFTDEQKAGFIARQLVETGQGTKGVADLLTALLPDTKLVYSKAGNVSDFRKRYDIPKSRLINDFHHAHDAYLNIVVGNIYFTKFTSNPLNYIRKECSSKDNKYQYNLGNMYKWDVKRDGKTAWIAAKEGETGTIATVKKMLSRNTPTLTRLTIEGHGGIADATLYSHKKAKQDAYIPLKSSDARMADVTKYGGYSSVTTAYLFLVEHEIKGKKIRTLETVPLYLKDRLENSKEKLEEYCRETLGYTNPSVRMKKIKLQSLIKLNGYYMQISGKTNKQFTVRNYVQFCLNSKWVDYIHKLEKYQDKGVIDDAITDEKNVELYNVLCEKHSVGIFTLRPNPVGDKIKKGYDKFVNLTTEEQIKLLIEIIKLTCVGIVSANLTLIGGASISGKMLISKNITDAKECLLINQSVTGLYENRIDLLRV

SEQ ID NO: 3167 - protein, 1358 aa, unidentified
  REGION 1..1358: note = Category: MG91 effectors
  REGION 1..1358: note = Description: MG91-359 effector
  source 1..1358: note = uncultivated organism sequence
MEKEYYLGLDMGTNSVGWAVTDDAYNLIRFKGKDMWGIREFDEANPAVERRTHRTSRRREQRNAVRMGLIRSYFADEIQKVDSNFYQRLDNSFFHVEDKQDNVKDKNGIFNDKNYKDADYYKQYPTIFHLRKELIEDASQKDVRLVYLAVANMFKHRGHFLLSGIGSESSKQTITDLYNQVSGLITEEYGISLKTDIAGTDFEQVLCSREYSRTRKSEKVCEILEIKNSDKLKKAFVKSMCGLSVKITDIIDDTFTEISDEDKKITFSFVDSDYDEKAGVLEEKLGTDVYDIISKLKEIHDKAQVAEIMKNYQYLSFARVADYEKHKKDLKILKRVVKKYFEPTVYDKLFRSEENGTYSAYVNSFNSEEKSRRNYKERKQEDLYNSIKKLLKSVDNVDDTDIEYIKNEMDKENFLPKQLTFKNGVIPNQIHASELKAILKNAEKYLPFLNEKDESGYTVSERILMLFSFQIPYYVGPVSSNSNGWVKRLEPGQVLPWNIDKKIDLKETSEQFIQRMVRNCTYIAGEKVLPKASLLYENFKVLNEINNLSINGERITVNLKQDLYNTLFLKGKRVTRKQIFNYFHSRGLVEEDSQISGIDIAVNNSLSTYGKFLPLFGEHLKEDKYKKMVDDIVFWCTVYGDSRKFLREQLEEKYSDVLDENQIKRITGMKFKDWGNLSKEFLELSGCCKSTGEVMPLIRAMWETNYNLMELLHSEEFTYSEELEEKQGKIEKVLSEYTIDDLNEEYFSAPVKRMIWQTLLIIKEIEKIMKCPPTRIFVEMTRKDDEKGDNGRKSSRKDQLLALYKKIQSEDKEWKKEMSSRIEDYDKNGALRSKKLYLYFIQKGLDMYTGKPIDLDNLMSANSNYDIDHIYPRHFVKDDNINNNLVLASKPANAEKSDIYPIKDSIYQKMKYTWKVLRDEGLITEEKYKRLTGRNPFTDEQKAGFIARQLVETGQGTKGVADLLTALLPDTKLVYSKAGNVSDFRKRYDIPKSRLINDFHHAHDAYLNIVVGNIYFTKFTSNPLNYIRKECSSKDNKYQYNLGNMYKWDVKRDGKTAWVAPEEGETGTLATVKKMLSRNTPILTRLTIEGHGGIADATLYSHKKAKQDTYIPLKSSDARMADVTKYGGYSSVTTAYLFLVEHEIKGKKIRTLETVPLYLKDRLENSKEKLEEYCRETLGYTNPSVRMKKIKLQSLIKLNGYYMQISGKTNKQFTVRNYVQFCLNSKWVDYIHKLEKYQDKGVIDDAITDEKNVELYNVLCEKHSVGIFTLRPNPVGDKIKKGYDKFVNLTTEEQIKLLIEIIKLTCVGIVSANLTLIGGASISGKMLISKNITDAKECLLINQSVTGLYENRIDLLRV

SEQ ID NO: 3168 - protein, 1358 aa, unidentified
  REGION 1..1358: note = Category: MG91 effectors
  REGION 1..1358: note = Description: MG91-360 effector
  source 1..1358: note = uncultivated organism sequence
MEKEYYLGLDMGTNSVGWAVTDDAYNLIRFKGKDMWGIREFDEANPAVERRTHRTSRRREQRNAVRMGLIRSYFADEIQKVDSNFYQRLDNSFFHVEDKQDNVKDKNGIFNDKNYKDADYYKQYPTIFHLRKELIEDASQKDVRLVYLAVANMFKHRGHFLLSGIGSESSKQTITDLYNQVSGLITEEYGISLKTDIAGTDFEQVLCSREYSRTRKSEKVCEILEIKNSDKLKKAFVKSMCGLSVKITDIIDDTFTEISDEDKKITFSFVDSDYDEKAGVLEEKLGTDVYDIISKLKEIHDKAQVAEIMKNYQYLSFARVADYEKHKKDLKILKRVVKKHFEPTVYDKLFRSEENGTYSAYVNSFNSEEKSRRNYKERKQEDLYNSIKKLLKSVDNVDDTDIEYIKNEMDKENFLPKQLTFKNGVIPNQIHASELKAILKNAEKYLPFLNEKDESGYTVSERILMLFSFQIPYYVGPVSSNSNGWVKRLESGQVLPWNIDKKIDLKETSEQFIQRMVRNCTYIAGEKVLPKASLLYENFKVLNEINNLSINGERIAVALKQDLYNTLFLKGKRVTRKQIFNYFHSRGLVEEDSQISGIDIAVNNSLSTYGKFLPLFGEHLKEDKYKKMVDDIVFWCTVYGDSRKFLREQLEEKYSDVLDENQIKRITGMKFKDWGNLSKEFLELSGCCKSTGEMIPLIRAMWETNYNLMELLHSEEFTYSEELEEKQGKIEKVLSEYTIDDLNEEYFSAPVKRMVWQTLLIIKEIEKIMKCPPTRIFVEMTRKDDEKGDNGRKSSRKDQLLALYKKIQSEDKEWKKEMSSRIEDYDKNGALRSKKLYLYFIQKGLDMYTGKPIDLDNLMSANSNYDIDHIYPRHFVKDDNINNNLVLASKPANAEKSDIYPIKDSIYQKMKYTWKVLRDEGLITEEKYKRLTGRNPFTDEQKAGFIARQLVETGQGTKGVADLLTALLPDTKLVYSKAGNVSDFRKKYDIPKSRLINDFHHAHDAYLNIVVGNIYFTKFTSNPLNYIRKECSSKDNKYQYNLGNMYKWDVKRDGKTAWIAAKEGETGTLATVKKMLSRNTPILTRLAIEGHGGIADATLYSHKKAKQDAYIPLKSSDARMADVTKYGGYSSVTTAYLFLVEHEIKGKKIRTLETVPLYLKDRLENSKEKLEEYCRETLGYTNPSVRMKKIKLQSLIKLNGYYMQISGKTNKQFTVRNYVQFCLNSKWVDYIHKLEKYQDKGVIDDAITDEKNVELYNVLCEKHSVGIFTLRPNPVGDKIKKGYDKFVNLTTEEQIKLLIEIIKLTCVGIVSANLTLIGGASISGKMLISKNITDAKECLLINQSVTGLYENRIDLLRV

SEQ ID NO: 3169 - protein, 1358 aa, unidentified
  REGION 1..1358: note = Category: MG91 effectors
  REGION 1..1358: note = Description: MG91-361 effector
  source 1..1358: note = uncultivated organism sequence
MEKEYYLGLDMGTNSVGWAVTDDAYNLIRFKGKDMWGIREFDEANPAVERRTHRTSRRREQRNAVRMGLIRSYFADEIQKVDSNFYQRLDNSFFHVEDKQDNVKDKNGIFNDKNYKDADYYKQYPTIFHLRKELIEDAFQKDVRLVYLAVANMFKHRGHFLLSGIGSESSKQTITDLYNQVSGLITEEYGISLKTDIAGTDFEQVLCSREYSRTRKLEKVCEILEIKNSDKLKKAFVKSMCGLSVKITDVIDDTFTEISDEDKKITFSFVDSDYDEKAGVLEEKLGTDVYDIISKLKEIHDKAQVAEIMKNYQYLSFARVADYEKHKKDLKILKRVVKKYFEPTVYDKLFRSGENGTYSAYVNSFNSGEKSRRNYKERKQEDLYNSIKKLLKSIDNVCDTDIEYIKNEIEKENFLPKQLTFKNGVIPNQIHASELKAILKNAEKYLPFLNEKDESGYTVSERILMLFSFQIPYYVGPVSPNSNGWVKRLEPGQVLPWNIDKKIDLKETSEQFIQRMVRNCTYIAGEKVLPKASLLYENFKVLNEINNLSINGERIAVALKQDLYNTLFLKGKRVTRKQIFNYFHSRGLVEEDSQISGIDIAVNNSLSTYGKFLPLFGEHLKEDKYKKMVDDIVFWCTVYGDSRKFLREQLEEKYSDVLDENQIKRITGMKFKDWGNLSKEFLELLGCCKSTGEMIPLIRAMWETNYNLMELLHSEEFTYSEELEEKQGKIEKVLSEYTIDDLNEEYFSAPVKRMVWQTLLIIKEIEKIMKCPPTRIFVEMTRKDDEKGDNGRKSSRKDQLLALYKKIQSEDKEWKKEMSSRIEDYDKNGALRSKKLYLYFIQKGLDMYTGKPIDLDNLMSANSNYDIDHIYPRHFVKDDNINNNLVLASKPANAEKSDIYPIKDSIYQKMKYTWKVLRDEGLITEEKYKRLTGRNPFTDEQKAGFIARQLVETGQGTKGVADLLTALLPDTKLVYSKAGNVSDFRKRYDIPKSRLINDFHHAHDAYLNIVVGNIYFTKFTSNPLNYIRKECSSKDNKYQYNLGNMYKWDVKRDGKTAWIAAKEGETGTIATVKKILSRNTPTLTRLTIEGHGGIADATLYSHKKAKQDAYIPLKSSDARMADVTKYGGYSSVTTAYLFLVEHEIKGKKIRTLETVPLYLKDRLENSKEKLEEYCRESLGYTNPSVRMKKIKLQSLIKLNGYYMQISGKSIKQFEVRNYVQICLNGKWVDYIHKLEKYQDKGVIDNAITDEKNVELYNVLCEKHNVGIYTMRPNPVGDRIKNGYDKFVNLTTEEQIKLLIEIIKLTCVGIVSADLTLIGGAAISGKMLMSKNITDANECILINQSVTGLYENRIDLLRV

SEQ ID NO: 3170 - protein, 1358 aa, unidentified
  REGION 1..1358: note = Category: MG91 effectors
  REGION 1..1358: note = Description: MG91-362 effector
  source 1..1358: note = uncultivated organism sequence
MEKEYYLGLDMGTNSVGWAVTDDAYNLIRFKGKDMWGIREFDEANPAVERRTHRTSRRREQRNAVRMGLIRSYFADEIQKVDSNFYQRLDNSFFYVEDKQDNVKDKNGIFNDKNYKDANYYKQYPTIFHLRKELIEDASQKDVRLVYLAVANMFKHRGHFLLSGIGSESSKQTITDLYNQVSGLITEEYGISLKTDIAGTDFEQVLCSREYSRTRKSEKVCEILEIKNSDKLKKAFVKSMCGLSVKITDIIDDTFTEISDEDKKITFSFVDSDYDEKAGVLEEKLGTDVYDIISKLKEIHDKAQVAEIMKNYQYLSFARVADYEKHKKDLKILKRVVKKYFEPTVYDKLFRSEENGTYSAYVNSFNSEEKSRRNYKERKQEDLYNSIKKLLKSVDNVDDTDIEYIKNEMDKENFLPKQLTFKNGVIPNQIHASELKAILKNAEKYLPFLNEKDESGYTVSERILMLFSFQIPYYVGPVSSNSNGWGKRLEPGQVLPWNIDKKIDLKETSEQFIQRMVRNCTYIAGEKVLPKASLLYENFKVLNEINNLSINGERITVNLKQDLYNTLFLKGKRVTRKQIFNYFHSRGLVEEDSQISGIDIAVNNSLSTYGKFLPLFGEHLKEDKYKKMVDDIVFWCTVYGDSRKFLREQLEEKYSDVLDENQIKRITGMKFKDWGNLSKEFLELSGCCKSTGEVMPLIRAMWETNYNLMELLHSEEFTYSEELEEKQGKIEKVLSEYTIDDLNEEYFSAPVKRMVWQTLLIIKEIEKIMKCPPTRIFVEMTRKDDEKGDNGRKSSRKDQLLALYKKIQSEDKEWKKEMSSRIEDYDKNGALRSKKLYLYFIQKGLDMYTGKPIDLDNLMSANSNYDIDHIYPRHFVKDDNINNNLVLASKPANAEKSDIYPIKDSIYQKMKYTWKVLRDEGLITEEKYKRLTGRNPFTDEQKAGFIARQLVETGQGTKGVADLLTALLPDTKLVYSKAGNVSDFRKRYDIPKSRLINDFHHAHDAYLNIVVGNIYFTKFTSNPLNYIRKECSSKDNKYQYNLGNMYKWDVKRDGKTAWVAPEEGETGTLATVKKMLSRNTPILTRLTIEGHGGIADATLYSHKKAKQDTYIPLKSSDARMADVTKYGGYSSVTTAYLFLVEHEIKGKKIRTLETVPLYLKDRLENSKEKLEEYCRETLGYTNPSVRMKKIKLQSLIKLNGYYMQISGKTNKQFTVRNYVQFCLNSKWVDYIHKLEKYQDKGVIDDAITDEKNVELYNVLCEKHSVGIFTLRPNPVGDKIKKGYDKFVNLTTEEQIKLLIEIIKLTCVGIVSANLTLIGGASISGKMLISKNITDAKECLLINQSVTGLYENRIDLLRV

SEQ ID NO: 3171 - protein, 1358 aa, unidentified
  REGION 1..1358: note = Category: MG91 effectors
  REGION 1..1358: note = Description: MG91-363 effector
  source 1..1358: note = uncultivated organism sequence
MEKEYYLGLDMGTNSVGWAVTDDAYNLIRFKGKDMWGIREFDEANPAVERRTHRTSRRREQRNAVRMGLIRSYFADEIQKVDSNFYQRLDNSFFHVEDKQDNVKDKNGIFNDKNYKDADYYKQYPTIFHLRKELIEDASQKDVRLVYLAVANMFKHRGHFLLSGIGSESSKQTITDLYNQVSGLITEEYGISLKTDIAGTDFEQVLCSREYSRTRKSEKVCEILEIKNSDKLKKAFVKSMCGLSVKITDIIDDTFTEISDEDKKITFSFVDSDYDEKAGVLEEKLGTDVYDIISKLKEIHDKAQVAEIMKNYQYLSFARVADYEKHKKDLKILKRVVKKYFEPTVYDKLFRSEENGTYSAYVNSFNSEEKSRRNYKERKQEDLYNSIKKLLKSVDNVDDTDIEYIKNEMDKENFLPKQLTFKNGVIPNQIHASELKAILKNAEKYLPFLNEKDESGYTVSERILMLFSFQIPYYVGPVSPNSNGWVKRLEPGQVLPWNIDKKIDLKETSEQFIQRMVRNCTYIAGEKVLPKASLLYENFKVLNEINNLSISGERIAVALKQDLYNTLFLKGKRVTRKQIFNYFHSRGLVEEDSQISGIDIAVNNSLSTYGKFLPLFGDHLKEDKYKKMVDDIVFWCTVYDDSRKFLREQLEEKYSDVLDENQIKRITGMKFKDWGNLSKEFLELSGCCKSTGEVMPLIRAMWETNYNLMELLHSEEFTYSEELEEKQGKIEKVLSEYTIDDLNEEYFSAPVKRMVWQTLLIIKEIEKIMKCPPTRIFVEMTRKDDEKGDNGRKSSRKDQLLALYKKIQSEDKEWKKEMSSRIEDYDKNGALRSKKLYLYFIQKGLDMYTGKPIDLDNLMSANSNYDIDHIYPRHFVKDDNINNNLVLASKPANAEKSDIYPIKDSIYQKMKYTWKVLRDEGLITEEKYKRLTGRNPFTDEQKAGFIARQLVETGQGTKGVADLLTALLPDTKLVYSKAGNVSDFRKRYDIPKSRLINDFHHAHDAYLNIVVGNIYFTKFTSNPLNYIRKECSSKDNKYQYNLGNMYKWDVKRDGKTAWVAPKEGETGTLATVKKMLSRNTPILTRLAIEGHGGIVDATRYSHKKVKQDTYIPLKSSDARMADVTKYGGYSDVKIAYLFLVEHETKGKKIRTLETVPIYLKDRLENSKEKLEEYCRETLGYTNPSVRMKKIKLQSLIKLNGYYMQISGKTNKQFTVRNYVQFCLNSKWVDYIHKLEKYQDKGVIDDAITDEKNVELYNVLCEKHSVGIFTLRPNPVGDKIKKGYDKFVNLTTEEQIKLLIEIIKLTCVGIVSANLTLIGGASISGKMLISKNITDAKECLLINQSVTGLYENRIDLLRV

SEQ ID NO: 3172 - protein, 1358 aa, unidentified
  REGION 1..1358: note = Category: MG91 effectors
  REGION 1..1358: note = Description: MG91-364 effector
  source 1..1358: note = uncultivated organism sequence
MEKEYYLGLDMGTNSVGWAVTDDAYNLIRFKGKDMWGIREFDEANPAVERRTHRTSRRREQRNAVRMGLIRSYFADEIQKVDSNFYQRLDNSFFHVEDKQDNVKDKNGIFNDKNYKDADYYKQYPTIFHLRKELIEDASQKDVRLVYLAVANMFKHRGHFLLSGIGSESSKQTITDLYNQVSGLITEEYGISLKTDIAGTDFEQVLCSREYSRTRKSEKVCEILEIKNSDKLKKAFVKSMCGLSVKITDVIDDTFTEISDEDKKITFSFVDSDYDEKAGVLEEKLGTDVYDIISKLKEIHDKAQVAEIMKNYQYLSFARVADYEKHKKDLKILKRVVKKYFEPTVYDKLFRSGENGTYSAYVNSFNSGEKSRRNYKERKQEDLYNSIKKLLKSIDNVCDTDIEYIKNEIEKENFLPKQLTFKNGVIPNQIHASELKAILKNAEKYLPFLNEKDESGYTVSERILMLFSFQIPYYVGPVSSNSNGWVKRLEPGQVLPWNIDKKIDLKETSEQFIQRMVRNCTYIAGEKVLPKASLLYENFKVLNEINNLSINGERIAVALKQDLYNTLFLKGKRVTRKQIFNYFHSRGLVEEDSQISGIDIAVNNSLSTYGKFLPLFGEHLKEDKYKKMVDDIVFWCTVYGDSRKFLREQLEEKYSDVLDENQIKRITGMKFKDWGNLSKEFLELLGCCKSTGEMIPLIRAMWETNYNLMELLHSEEFTYSEELEEKQGKIEKVLSEYTIDDLNEEYFSAHVKRMVWQTLLIIKEIEKIMKCPPTRIFVEMTRKDDEKGDNGRKSSRKDQLLALYKKIQSEDKEWKKEMSSRIEDYDKNGALRSKKLYLYFIQKGLDMYTGKPIDLDNLMSANSNYDIDHIYPRHFVKDDNINNNLVLASKPANAEKSDIYPIKDSIYQKMKYTWKVLRDEGLITEEKYKRLTGRNPFTDEQKAGFIARQLVETGQGTKGVADLLTALLPDTKLVYSKAGNVSDFRKRYDIHKSRLINDFHHAHDAYLNIVVGNIYFTKFTSNPLNYIRKECSSKDNKYQYNLGNMYKWDVKRDGKTAWIAAKEGETGTIATVKKILSRNTPTLTRLTIEGHGGIADATLYSHKKAKQDAYIPLKSSDARMADVTKYGGYSSVTTAYLFLVEHEIKGKKIRTLETVPLYLKDRLENSKEKLEEYCRETLGYTNPSVRMKKIKLQSLIKLNGYYMQISGRTGNRFTLRNYVQLCLNGKWVDYIHKLEKYQDKGFIDNVITDEKNVELYNVLCEKHNVGIYTMRPNPVGDRIKNGYDKFVNLTTEEQIKLLIEIIKLTCVGIVSADLTLIGGAAISGKMLMSKNITDANECILINQSVTGLYENRIDLLRV

SEQ ID NO: 3173 - protein, 1358 aa, unidentified
  REGION 1..1358: note = Category: MG91 effectors
  REGION 1..1358: note = Description: MG91-365 effector
  source 1..1358: note = uncultivated organism sequence
MEKEYYLGLDMGTNSVGWAVTDDAYNLIRFKGKDMWGIREFDEANPAVERRTHRTSRRREQRNAVRMGLIRSYFADEIQKVDSNFYQRLDNSFFHVEDKQDNVKDKNGIFNDKNYKDADYYKQYPTIFHLRKELIEDASQKDVRLVYLAVANMFKHRGHFLLSGIGSESSKQTITDLYNQVSGLITEEYGISLKTDIAGTDFEQVLCSREYSRTRKSEKVCEILEIKNSDKLKKAFVKSMCGLSVKITDVIDDTFTEISDEDKKITFSFVDSDYDEKAGVLEEKLGTDVYDIISKLKEIHDKAQVAEIMKNYQYLSFARVADYEKHKKDLKILKRVVKKYFEPTVYDKLFRSGENGTYSAYVNSFNSGEKSRRNYKERKQEDLYNSIKKLLKSIDNVCDTDIEYIKNEIEKENFLPKQLTFKNGVIPNQIHASELKAILKNAEKYLPFLNEKDESGYTVSERILMLFSFQIPYYVGPVSSNSNGWVKRLEPGQVLPWNIDKKIDLKETSEQFIQRMVRNCTYIAGEKVLPKASLLYENFKVLNEINNLSINGERIAVALKQDLYNTLFLKGKRVTRKQIFNYFHSRGLVEEDSQISGIDIAVNNSLSTYGKFLPLFGEHLKEDKYKKMVDDIVFWCTVYGDSRKFLREQLEEKYSDVLDENQIKRITGMKFKDWGNLSKEFLELLGCCKSTGEMIPLIRAMWETNYNLMELLHSEEFTYSEELEEKQGKIEKVLSEYTIDDLNEEYFSAHVKRMVWQTLLIIKEIEKIMKCPPTRIFVEMTRKDDEKGDNGRKSSRKDQLLALYKKIQSEDKEWKKEMSSRIEDYDKNGALRSKKLYLYFIQKGLDMYTGKPIDLDNLMSANSNYDIDHIYPRHFVKDDNINNNLVLASKTANAEKSDIYPIKDSIYQKMKYTWKVLRDEGLITEEKYKRLTGRNPFTDEQKAGFIARQLVETGQGTKGVADLLTALLPDTKLVYSKAGNVSDFRKRYDIPKSRLINDFHHAHDAYLNIVVGNIYFTKFTSNPLNYIRKECSSKDNKYQYNLGNMYKWDVKRDGKTAWIAAKEGETGTLATVKKMLSRNTPILTRLAIEGHGGIADATLYSHKKAKQDAYIPLKSSDARMADVTKYGGYSSVTTAYLFLVEHEIKGKKIRTLETVPLYLKDRLENSKEKLEEYCRETLGYTNPSVRMKKIKLQSLIKLNGYYMQISGKTNKQFTVRNYVQFCLNSKWVDYIHKLEKYQDKGFIDNVITDEKNVELYNVLCEKHNVGIYTMRPNPVGDKIKKGYDKFVNLTTEEQIKLLIEIIKLTCVGIVSANLTLIGGAAISGKMLISKNITDAKECLLINQSVTGLYENRIDLLRV

SEQ ID NO: 3174 - protein, 1352 aa, unidentified
  REGION 1..1352: note = Category: MG91 effectors
  REGION 1..1352: note = Description: MG91-366 effector
  source 1..1352: note = uncultivated organism sequence
MTAFKYYLGLDMGTNSVGWAATDPEYRLLKAKGKDLWGIREFNEASGAVERRTHRISRRRRQREQVRIGILKDYFHDAICEVDPSFFQRLENSKYHEEDKDVEVRYKNNIFNDSNYTDKDYFNEYPTIYHLRNELISSTEKHDVRLVFLALLNMFKHRGHFLNAGLGENNGESNIDNAYFELTELLSELTEYHLSQDIDCKQIEAILSRRDMSRTHKAEELAGVLHVDLKNKPYKELIRGLCGLKFNACVVFPDVQSEEVTKLDICLSESTFDEKSDEIANIIGEDYFEIIMAMKEMFDIGSLASIMKGHNYLSQARVASYTKHKEDLKLLKEVIKKYCGKKEYDKFFNSDADGSYASYVGSYNSKNKERRVGNKRTSEELYKEIKKLLKDAQKEDENVQKILTSIENETFLPKQLTASNGVIPNQVHAREMKKILSNAENYLPFLTEKDETGLSVSERILKLFTFQIPYYVGPTSENSGKNGGNGWVVRREDGQVLPWNIDEKIDMKATSEAFISRMVRRCTYISGEQVLPKASLEYQSYCVLNEINNIKIDGERISVELKQDIYKAVFQKGKKVTKKQLCKYLHTRGIIETEEQVTGVDVSINNALTTYGKFKPIFGEDISKDSVQKMIEDIVFWCTVYGDSKKFLKDRIEEKYGNKLSEEQIKRILGFKFKDWGNLSKKFLELNGADTSTGESISIIRALWNNNLNLMELINSSLYNYKECLAEYQNTMLKTLSEIEAEDLNEYYFSAPVRRMIWQTILVIKELVKVLGCEPERIFVEMTRKPDEHKTRTSSRRNKFEELYKKVKDETTDWMQVIANAEEDGKIRSKKMYLYLTQKGRCMYTGKHIELDDLFDNNLYDIDHIYPRHFVKDDNIDNNLVLVCKEKNAHKSDHYPIEEEIFLSQKKMWLELRKSGFITEEKYNRLMDRNPFSDEQKAGFIARQLVETSQGTKGVANILRQLLPSSKIVYAKASNVSEFRCTRDDIQKSRLVNDFHHAHDAYLNIVVGNVYYVKFTQNPLNFIKKDYDKYKEDYNLSKMFDWDVKRNGEVAWIAQRKDGAAGTITTVKRMLSRNTPLMTRYSFDGKGGLTNETLYSAKKAKGEGYIPFKSSDDKMQDVTKYGGFTSVTGAYFFLVEHTEKKKRIRTIESVPVYLAQKIEQNPDELKKYCEEILGLIDADIRLKKIKIGSLIKRNGYFCYITGKTVNRLIVRNAVNLCLKNEWIKYISKLEKVKEKDAVDKIITKEKNEVLYSELIQKFKHGIFSKRPNPVGDKLEKDSEKFNNLSIKDQCAVLCQVLRMAAILGSECDMTLLGDSPNCGKMLISKKIGDEEIYLINQSVTGLYEKKINLHTV

SEQ ID NO: 3175 - protein, 1353 aa, unidentified
  REGION 1..1353: note = Category: MG91 effectors
  REGION 1..1353: note = Description: MG91-367 effector
  source 1..1353: note = uncultivated organism sequence
MEKDYYLGLDMGTDSVGWAVTDENYNLIRAKGKDLWGVREFESAKPAADRRSYRISRRRRQREQVRLGMLKSIFADAIKEKDPLFFIRLENSKYWKDDKNSKINTKNVLFDDPGYTDADYFKEFPTIFHLRLKLMNDDSGRYLSDPRFVYLACLQLFKHRGHFLSDISDETDPSDLSSTYERFKSLYCELTGYEFTEKDVAADDIMNVLSDRNLSRTAKKEKLIDVFSFSKSDSSKTECLKSICGLESDACKIFPDLKTEDIKKLSFNFSKSDYEEKSAELNESVGDEYFELISILKDIYDKGTLADILKGKKYLSEARVEDYNKHKKDLVLLKSVYRKYKTQDEYNEMFRDPTKGYGAYIGSNFTKDKKTSRRGSKSRDVFYDYLKKSLKGLEEDPDVKTIFDDIAKENFLVKQLTSSNGVIPNQVHLKELKKILSNAENYLPFLKETDESGLSASQRIISIFSFTIPYYVGPVSELSEKNGGNGWVVRKEDGKVYPWNFEDKINISETKRRFIDRLINECTYISGEKVLPKQSLIYQKFAMLNELNSVRINGERLDVEFKQKAFKELFSKGKQVTLNEFKNYLNNNGINIDEKSEISGVGKSSEMTRFNNKLSSYQVFHSVFGDKLEDKKYYDAAENIIYLGTIYADDKKTFKKAIEEKYGDFLTPDEIKRVSGLKFKDWGTLSAALFNLQGAEKSTGEVMTLIDALWNTQLNFMELINSDAFSYKEELEKYKKKGEGTIQNFKFEELNDYYFSAPVKRMIWQTVLIVREIEHVLGKPPVKMFVEVTRHDEEKEKIPPSRKDTFLSLYKNIKDESHDWKAIIEKADESGVIRSQKMYLYLSQMGRDLYTGKEIELDELFTTKYDIDHIIPQSLKKDDSILNNKVLTSKDFNNNIKQDNPLCEAIDDAHYAERKKLWDRLHNYNLINDEKYKRLTNRKGFSEEDLEGFIARQIVETSQAVLGVINIFKEIMPDTKIVFSKAKPVSDFRKNEIGWLKSRTLNDYHHAHDAYLNIVVGNVYNTKFTDNPRNFIKKERQKDLNPNYHMNKVFWYNVERGGKVAWIAGEDGTKKTVLKTLAKNSELMTRQSFEQTGGLCNQQITNKDDAGSGIGYLPVKMGEDISKYGGYAKISQSYFFLVEHTFKKKRIRTIETVPAYLKSQIESDPDALKRYCAEKLGLVDPDIRLRRINYQSLAKYNGFYVTICSKTGVRFNIANAVRLTLPKEWNNYIKKLEKTEGDEEITEEKNIELYDILTDKHLNSIFLKRPNPVGENLKNGREKFVSLSKKEQVSTLNNILLFTGFASAGKADISSIGGSKNAGFMKISKNVTNADEFVLIENSVTGIYSVRKDLKTI

SEQ ID NO: 3176 - protein, 1352 aa, unidentified
  REGION 1..1352: note = Category: MG91 effectors
  REGION 1..1352: note = Description: MG91-368 effector
  source 1..1352: note = uncultivated organism sequence
MQEKPYYLGLDMGTNSVGWAVTDQHYNLLKAKGKDLWGIREFIEADTSVERRTHRISRRRRQREQARIGLLNDYFHDAIIAIDPSFFQRLENSKYHLEDKDQNVRYKYNIFNDPDYTDADYYTQYPTIYHLRKELLENPKPHDVRLVYLALLNMFKHRGHFLNSGISDGNNERSLKDAYINFAISVSELTEDYFNQDVDYSTIEGILSSRDLNRTKKAEELSTVLGIDFKNKKYKEYLRAICGLKINAYTLFSDQLPDDTTKIDLCVSDASFDEKSEELVSLIGEDLFQIILNIKEIYDIGSLAGILKGYTYLSQARVAAYDKHKHDLKLLKSSIKKYCTKEEYNNFFNSDADGSYASYIGSFNSGNKERRVGSKRTSEDLYKEIKKLLKGANKSDPAINEIFTSIETESFLPKQLTASNGIIPNQVHSKEMARILTNAENYLPFLKETDENNLSISNRILQLYKFQIPYYIGPVTEKSQRDGGNGWVIRKDNGRVFPWNIEEKIDVKATSEAFISRMVRRCTYMNGKQVLPKASLEYESFRVLNEINNLRIDGERIPVTLKQDIYTDLFQKGKKVTKKQLCNYLATRGLIESSEQVTGIDIAINNSLSTYGKFKAIFGEDIKLDHIQHMIEDIVFWCTVYGDSKQFLKEQIEDKYKGKLSPEQMKRILGFKFKDWGNLSKEFFELKGADKSTGEAVSIIRALWENNLNLMELINSSEFDFKEQLADYEANSLKTLSDFEPEDLNDYYFSAPVRRMIWQTTLIIKELVHVLGKEPARIFIEMTREKDASRGRTLSRKKKFEDLYKNVKDENTDWAKVIEHADESGTIRSKKMYLYLTQKGRCMYTGNHIELSDLFNDNLYDIDHIYPRHFVKDDNIDNNLVLVTKEKNAHKSDTYPLEAEIFNKQRNMWTQLRKEGFISEEKYNRLMGRNAFTDEQKAGFIARQLVETSQGTKGVAELFHQLLPNSKIVYAKAGNVSDFRRNRELPKSRLVNDFHHAHDAYLNIVVGNVYYVKFTQNPINYIKNSYNKDMNKNNYNLSRMFDWDVKRGDEVAWIAQKQDGAAGTISTVKKMLSKNTPLMTRLSYEGKGALANETLYSAEKAKGEGYIPFKSSDTKIQDVTKYGGFTSVTGAYFFLVEHDEKKKRIRTIESVPLYLADKIDKDSSELERYCDKLGLVNYDVRVRKIKIGSLIKYNGYFCYITGKTGYRLIVRNATNLCLTSNWRKYIKKIEKYKETTIIDNVITAEENIKLYNELLNKFTVGIFGRRPNPIGEKMDSARDKFASLSIENQCLALYQILQLTAILGNESDLQLIGASTHAGKMLISKKIGTDEIYLINQSPTGLFETKIDLQTI

SEQ ID NO: 3177 - protein, 1353 aa, unidentified
  REGION 1..1353: note = Category: MG91 effectors
  REGION 1..1353: note = Description: MG91-369 effector
  source 1..1353: note = uncultivated organism sequence
MEQKTYYLGLDMGTNSVGWAVTDENYNLLRAKGKDLWGIREFESASGAIERRAHRVSRRNRQRQQVRVGKLNCYFEDAINEVDPNFYARLRNSKYHLEDKEEAVRTPNGIFNDPAYKDKDYYAQYPTIYHLRKELLTNDEPHDVRLVYLALLNMFKHRGHFLNAALTSEGTRHMQDAYNSFQENVYEMCDLSFPDVDGKEIEAVLSNRDLNRSRKSEALMELFHFTKKENKTELEFVKGMCGLTTEASKLFGDLGLEEKVEICFSKASYEDRIPDIMDAVGEENFRVLENLKEIADIGTLAGVLKGYTYLSEARVAEYEKHKSDLKLLKSVIRQYGTQEDYNKMFRSEESGTYSAYVNSYNSGKKQRRDMKGRTREDFYKSLKKLLKGMPEEDENVAQILAEIDKEKFLPKQLTASNGVIPNQVHLKEMKAILRNAEQYLPFLKEVDESGLTTSERIWRLFSFQIPYYVGPVTPNSSRDGGNGWVVRKEEGEVLPWNINEKIDLPATQDAFIKRLVRECTYISGEKVLPKGALIYEKFAVLNEINNIRIDNERLDTPLKQAIYNDLFCTGKRITRKKILDYLSAQGKLKNESQLTGIDKNINNSLSSYGKFLGVFGEDLKKDHYIDMSEDIIYWCTVYGDSKKVLRSLLEEKYQGELTEKQMKRILGFKFGDWGRMSREFLELEGIDKETGEVVTLIHAMWDNSMNMMELIHSDRFTFAESLESKKTKMDKTLSEFKHEDLDEYYFSAPVKRMIWQTLLVIKELEKVLGGPPTRLFVEMTRSDDVKGDKGRKKSRKDELLELYKKVKDESHDWTAIINAADENGTIRSKKMYLYLTQRGRCMYTGKPIDLNQLFDNNIYDIDHIYPRHFVKDDNLRNNLVLVDKRANARKSDNYPIDSNIRCNDSIKALWYSLKKEKLISEEKYRRLTGSNPFSDEQKAGFIARQMVETSQATKGVNDLLKQLLPETELVYSKASNVSDFRRDYDLLKSRTINDFHHANDAYLNIVVGNVFLVKFTNNPRNFIKEYNRDKYTYGYNLGRIFERDVKRGDQVAWIADDRNGNHGTIETVKKMMAKHTPLLTRMNFVNNGQISKGTLYSKFKAKPDTYIPLKETDEKMRDISKYGGFTNVSTAYFFLVEHGKANKRIRTIEAVPIYMKSRLENNEEELKKYCVEQLGLLDPSIRLNKIKIQSQFRINGFYVFFRGKTGHELLWGNNTSLCLEPKWNNYISYLDKYAKNGYMNRFITKEENEHLYSELLKKHSEAIFSKRPNSFSKIVIAGQEKFKDLDIEKQCVALSQLISATSIGSSIADVTMIGGTAQTGRMRTNKKISGYELVLINTSATGLYKTEIDLNKI

SEQ ID NO: 3178 - protein, 1123 aa, unidentified
  REGION 1..1123: note = Category: MG91 effectors
  REGION 1..1123: note = Description: MG91-370 effector
  source 1..1123: note = uncultivated organism sequence
MSKKILSLDLGITSIGYSVLDEMQNDRYRLLDYGVSMFDKATDKDGNSKKLLHSINSSTANLYALRKKRKQNLASLFEAFGLGEKTTLLQQEKNNLYKNKWQLRAKKAFEEKLEVGELFTIFYALAKHRGYKSLESGDLLEELCEKLGIEVQSASKQKKDDDEKGKIKKALKTIENFRVENPEKTVAQIIYEAEIKKENPTFRNHDNYNYMIRREYINDEIGKIIKMQENFGFFECSFDVDLFITKLIATIDDQKDSTNDLNFFGNCQYYDDEKAAHQYSLLSDIFKMYESVANITFNAKPVVKITKEQIQLITDDFFKKIVKGKNVTEIKYKDIRKILQLSDDMKIFNKEDSRIIKGKKSDNTIIKFHFLNNLSKINNNFITKALEQENKYEILKEIFDVLAYEKAPHTIFENLKNKIEDEQTIIDLIRYKSGNSMNISHYAMMQFIPYFEEGFTTDAIKEKLGLDRQEDYSKFKKGIKYLHVNNFEKDDKLEINNHPVKSVVSATMRVVKHLHATHGAFDEIRVESTRELSQNEETKKEIEKANKALQKEIDTIVNNKEYQEIAKSYGKNLKKYARKILMYLAQEGRDIYSGKGIEIADIFTNSVDLDHIVPKSLGGLSVKHNLVLAHRNTNVQKSNQLPLNFVADKQAFINRVEYLFSEHKINWKKRKNLLATNLDETFQDIFESKSLRATSYIEALTAQMLKRYYPFANEKKRVDGSAVRHIQGRATSNIRKLLHVKIKVRDTNIHHAIDAILIGLTNQSWLQKLSNTFRENMGIIDDEARAKIKKEIPLIEGIEPQELIEMIEDRYNVFGEESVFYKDIWGKTKVINFWISKKPMVSKIHKDTIYAKKPNGFYTVRESIINKFGGLKITPKTSSEEFIKIFKKNILHKMYLYKTNPKDTMCQIIQKRGEAIATLLDSFTDFDSKNKEQMSEAKMALDSLIHSDLVDNNGNIVRKVKFYQTNLTGFDVRGGLATKEKTFIGFQSWLENEKLHYKRIDVANFKKIKKQNDGNFQVFKNDIVFFVYPNGSFRGGKIVSFLEENKTGAFQNSKFPMSLKYQPEIFCELNKEKKHVKTKPRSIGKSTGIIKLNLDIIGNIKSYTCIGKIESEILDFIKASVNG

SEQ ID NO: 3179 - protein, 1342 aa, unidentified
  REGION 1..1342: note = Category: MG91 effectors
  REGION 1..1342: note = Description: MG91-371 effector
  source 1..1342: note = uncultivated organism sequence
MRYFMGLDMGTSSVGWAVTDEHYQLLRRKGKDMWGIREFEEAATAVERRTHRVSRRRRQRQVARIGLLQEYFHDAIHQVDPNFYQRLKNSKYHEEDKDEIVRESNGIFNDAEYTDKEYFKEFPTIFHLRQELIKSKEPHDVRLVYLALLNMFKHRGHFLNATLSADGESRKIKDIYTDFVDKAAEQLGVSFATDIRYEKLENYLSSNDLSRKRKGELIAELLHVTRKDKQQYALIECMLGLDKSVKLMFGDTLPEDFDKTIKVNFSDIAFEEKATEISEAIGEEKYDLILIMKEIYDAAILNRIMNGYTYLSDARVAEYEKHKSDLACLKHYIKEYGTQHQFDFLFRGTEKGSYSAYVHSVNSHEKQRRNMDGNKKEDLYSTLKKILKDMPENEEKTYIMMQIELDNFLPKQLTASNGVIPNQIHLKEMKKILANAENYLPFLKEKDESGYTVSERIQKLFAFQIPYYIGPTTEKSAEFGGNGWVVRKEEGKVLPWNIDQKIDMKKTSEEFISRMVRRCTYMNDEQVLPKESLEYESFCVLNELNNIKVYGEKLPVDIKQDIYRTLCEKGKRITKKSLMKYLVGRGVIKAEDEAQLTGLMDGLNNTLKSFAKFKAIFGDAIYEDSCKKMVEQIIFWCTVYGDSKHFLKEQLLEKYGEVLTDAQIKRILGIKFRDWGNLSKKFLELQGCSKETGEVNSLIRMLWETNDNLMELLAQDSYTFKEELENMQESTYKVLTELQLEDLDHMYFSAPVKRMIWQTILIIKEVTKVMGCQPERLFIEMTREHGQKNDIKDSRAKKFYELYSKIKDEDKDWRKVIEDADKDGKIRSKKMYLYLTQMGRCMYTGRPIDLDQLFNNNLYDIDHIYPRHYVKDDNLENNMVLVEKQSNAHKSDVYPLESGIYEKQVNWWRELHRKNLINDEKLKRLTGRNPFTDEQKAGFIARQLVETSQGTKGVATILQEALPDTTLVYAKARNVSDFRKDNDLLKSRIVNDFHHAHDAYLNIVIGNVYYVKFTKNPINFIREHGTYNLGKMFAKDVKRGDDIGWVAQSGNGQTATMETIKRTMARNTPLLTRMSYEVTGGLANQTLYSASKAKEGTYIPLKSSDERMQDVTKYGGFTSVSTAYFMLVEHDGKKGKRIRTIESVPIMWKERIEKNPAELERYCLEVLKLSNPDIRVRKILIQSLIKRNGYYMQITGKTGNRMYVRNMVSLCLVQDWVNYIKKLEKDKDENISKEKNIRLYDVLMDKHINTIYNTRPNPVGDLLIKRRSDFIELKITDQVIILLEILKLTQTALGSANLKLIGEAEKTGVMLISKDITALDEMLLINQSVTGLYEQRVNLLTV

SEQ ID NO: 3180 - protein, 1358 aa, unidentified
  REGION 1..1358: note = Category: MG91 effectors
  REGION 1..1358: note = Description: MG91-372 effector
  source 1..1358: note = uncultivated organism sequence
MEKEYYLGLDMGTNSVGWAVTDDAYNLIRFKGKDMWGIREFDEANPAVERRTHRTSRRRKQRNAVRMGLIRSYFADEIQKVDSNFYQRLDNSFFHVEDKQDNVKDKNGIFNDKNYKDADYYKQYPTIFHLRKELIEDASQKDVRLVYLAVANMFKHRGHFLLSGIGSESSKQTITDLYNQVSGLITEEYGISLKTDIAGTDFEQVLCSREYSRTRKSEKVCEILEIKNSDKLKKAFVKSMCGLSVKITDIIDDTFTEISDEDKKITFSFVDSDYDEKAGVLEEKLGTDVYDIISKLKEIHDKAQVAEIMKNYQYLSFARVADYEKHKKDLKILKRVVKKYFEPTVYDKLFRSEENGTYSAYVNSFNSEEKSRRNYKERKQEDLYNSIKKLLKSVDNVDDTDIEYIKNEMDKENFLPKQLTFKNGVIPNQIHASELKAILKNAEKYLPFLNEKDESGYTVSERILMLFSFQIPYYVGPVSPNSNGWVKRLEPGQVLPWNIDKKIDLKETSEQFIQRMVRNCTYIAGEKVLPKASLLYENFKVLNEINNLSISGERIAVALKQDLYNTLFLKGKRVTRKQIFNYFHSRGLVEEDSQISGIDIAVNNSLSTYGKFLPLFGDHLKEDKYKKMVDDIVFWCTVYGDSRKFLREQLEEKYSDVLDENQIKRITGMKFKDWGNLSKEFLELSGCCKSTGEMMPLIRAMWETNYNLMELLHSEEFTYSEELEEKQGKIEKVLSEYTIDDLNEEYFSAPVKRMVWQTLLIIKEIEKIMKCPPTRIFVEMTRKDDEKGDNGRKSSRKDQLLALYKKIQSEDKEWKKEMSSRIEDYDKNGALRSKKLYLYFIQKGLDMYTGKPIDLDNLMSANSNYDIDHIYPRHFVKDDNINNNLVLASKPANAEKSDIYPIKDSIYQKMKYTWKVLRDEGLITEEKYKRLTGRNPFTDEQKAGFIARQLVETGQGTKGVADLLTALLPDTKLVYSKAGNVSDFRKKYDIPKSRLINDFHHAHDAYLNIVVGNIYFTKFTSNPLNYIRKECSSKDNKYQYNLGNMYKWDVKRDGKTAWIAAKEGETGTIATVKKMLSRNTPTLTRLTIEGPGGIADATLYSHKKAKQDAYIPLKSSDARMADVTKYGGYSSVTTAYLFLVEHEIKGKKIRTLETVPLYLKDRLENSKEKLEEYCGETLGYTNPSVRMKKIKLQSLIKLNGYYMQISGKTNKQFTVRNYVQFCLNSKWVDYIHKLEKYQDKGVIDDAITDEKNVELYNVLCEKHSVGIFTLRPNPVGDKIKKGYDKFVNLTTEEQIKLLIEIIKLTCVGIVSANLTLIGGASISGKMLISKNITDAKECLLINQSVTGLYENRIDLLRV

SEQ ID NO: 3181 - protein, 1352 aa, unidentified
  REGION 1..1352: note = Category: MG91 effectors
  REGION 1..1352: note = Description: MG91-373 effector
  source 1..1352: note = uncultivated organism sequence
MTAFKYYLGLDMGTNSVGWAATDPGYRLLKAKGKDLWGIREFNEASGAVERRTHRISRRRRQREQVRIGILKDYFHDAICEVDPGFFQRLENSKYHEEDKDVEVRYKNNIFNDSNYTDKDYFNEYPTIYHLRNELISSTEKHDVRLVFLALLNMFKHRGHFLNAGLGENNGESNIDNAYFELTELLSELTEYHLSQDIDCKQIEAILSRRDMSRTHKAEELAGVLHVDLKNKPYKELIRGLCGLKFNACVVFPDVQSEEVTKLDICLSESSFDEKSDEIANIIGEDYFEIIMAMKEMFDIGSLASIMKGHNYLSQARVASYTKHKEDLKLLKEVIKKYCGKKEYDKFFNSDADGSYASYVGSYNSKNKERRVGNKRTSEELYKEIKKLLQDAPKEDENVQKILTSIENETFLPKQLTASNGVIPNQVHAREMKKILSNAENYLPFLTEKDETGLSVSERILKLFTFQIPYYVGPTSENSGKNGGNGWVVRREDGQVLPWNIDEKIDMKATSEAFISRMVRRCTYISGEQVLPKASLEYQSYCVLNEINNIKIDGERISVELKQDIYKAVFQKGKKVTKKQLCKYLHTRGIIETEEQVTGVDVSINNALTTYGKFKPIFGEDISKDSVQKMIEDIVFWCTVYGDSKKFLKDRIEEKYGNKLSEEQIKRILGFKFKDWGNLSKKFLELNGADTSTGESISIIRALWNNNLNLMELINSSLYNYKECLAEYQNTMLKTLSEIEAEDLNEYYFSAPVRRIIWQTILVIKELVKVLGCEPERIFVEMTRKPDEHKTRTSSRRNKFEELYKKVKDEATDWMQVIAKAEEDGKIRSKKMYLYLTQKGRCMYTGKHIELDDLFDKNLYDIDHIYPRHFVKDDNIDNNLVLVCKEKNAHKSDHYPIEEEIFLSQKKMWLELRKSGFITEEKYNRLMGRSPFSDEQKAGFIARQLVETSQGTKGVANILRQLLPGSKIVYAKASNVSEFRHTRDDIPKSRLVNDFHHAHDAYLNIVVGNVYYVKFTQNPLNFIKKDYDKYKEDYNLSKMFDWDVKRNGEVAWIAQRKDGEAGTITTVKRMLSRNTPLMTRYSFEGKGGLENETLCSAKKAKGEGYIPFKSSDDKMQDVTKYGGFTKVTGAYFFLVEHTEKKKRIRTIESVPVYLAQKIEQNPDELKKYCEEILGLVDADIRLKKIKIGSLIKRNGYFCYITGKTGNRLSVRNAVNLCLKNEWIKYISKLEKVKEKDAVDEIITKEKNEVLYSELIQKFKHGIFSKRPNPVEDKLEKGSEKFSNLSIKEQCAVLCQILQLAAVLGSECDMTLLGESAHCGKMLISKKIGDEEIYLLNQSVTGLYEKKINLHTV

SEQ ID NO: 3182 - protein, 1352 aa, unidentified
  REGION 1..1352: note = Category: MG91 effectors
  REGION 1..1352: note = Description: MG91-374 effector
  source 1..1352: note = uncultivated organism sequence
MTAFKYYLGLDMGTNSVGWAATDPGYRLLKAKGKDLWGIREFNEASGAVERRTHRISRRRRQREQVRIGILKDYFHDAICEVDPGFFQRLENSKYHEEDKDVEVRYKNNIFNDGNYTDKDYFNEYPTIYHLRNELISSTEKHDVRLVFLALLNMFKHRGHFLNAGLGENNGESNIDNAYFELTELLSELTEYHLSQDIDCKQIEAILSRRDMSRTHKAEELAGVLHVDLKNKPYKELIRGLCGLKFNACVVFPDVQSEEVTKLDICLSESTFDEKSDEIANIIGEDYFEIIMAMKEMFDIGSLASIMKGHNYLSQARVASYTKHKEDLKLLKEVIKKYCSKKEYDKFFNSDADGSYASYVGSYNSKNKERRVGNKRTSEELYKEIKKLLKDAQKEDENVQKILTSIENETFLPKQLTASNGVIPNQVHAREMKKILSNAENYLPFLTEKDETGLSVSERILKLFTFQIPYYVGPTSENSGKNGGNGWVVRREDGQVLPWNIDEKIDMKATSEAFISRMVRRCTYISGEQVLPKASLEYQSYCVLNEINNIKIDGERISVELKQDIYKAVFQKGKKVTKKQLCKYLHTRGIIETEEQVTGVDVSINNALTTYGKFKPIFGEDISKDSVQKMIEDIVFWCTVYGDSKKFLKDRIEEKYGNKLSEEQIKRILGFKFKDWGNLSKKFLELNGADTSTGESISIIRALWNNNLNLMELINSSLYNYKECLAEYQNTMLKTLSEIEAEDLNEYYFSAPVRRMIWQTILVIKELVKVLGCEPERIFVEMTRKPDEHKTRTSSRRNKFEELYKKVKDETTDWMQVIANAEEDGKIRSKKMYLYLTQKGRCMYTGKHIELDDLFDNNLYDIDHIYPRHFVKDDNIDNNLVLVCKEKNAHKSDHYPIEEEIFLSQKKMWLELRKSGFITEEKYNRLMDRNPFSDEQKAGFIARQLVETSQGTKGVANILRQLLPGSKIVYAKASNVSEFRCTRDDIQKSRLVNDFHHAHDAYLNIVVGNVYYVKFTQNPLNFIKKDYDKYKEDYNLSKMFDWDVKRNGEVAWIAQRKDGAAGTITTVKRMLSRNTPLMTRYSFDGKGGLTNETLYSAKKAKGEGYIPFKSSDDKMQDVTKYGGFTSVTGAYFFLVEHTEKKKRIRTIESVPVYLAQKIEQNPDELKKYCEEILGLIDADIRLKKIKIGSLIKRNGYFCYITGKTGNRLIVRNAVNLCLKNEWIKYISKLEKVKEKDAVDKIITKEKNEVLYSELIQKFKHGIFSKRPNPVGDKLEKDSEKFNNLSIKDQCAVLCQVLRMAAILGSECDMTLLGDSPNCGKMLISKKIGDEEIYLINQSVTGLYEKKINLHTV

SEQ ID NO: 3183 - protein, 1358 aa, unidentified
  REGION 1..1358: note = Category: MG91 effectors
  REGION 1..1358: note = Description: MG91-375 effector
  source 1..1358: note = uncultivated organism sequence
MEKEYYLGLDMGTNSVGWAVTDDAYNLIRFKGKDMWGIREFDEANPAVERRTHRTSRRREQRNAVRMGLIRSYFADEIQKVDSNFYQRLDNSFFHVEDKQDNVKDKNGIFNDKNYKDADYYKQYPTIFHLRKELIEDASQKDVRLVYLAVANMFKHRGHFLLSGIGSESSKQTITDLYNQVSGLITEEYGISLKTDIAGTDFEQVLCSREYSRTRKSEKVCEILEIKNSDKLKKAFVKSMCGLSVKITDIIDDTFTEISDEDKKITFSFVDSDYDEKAGVLEEKLGTDVYDIISKLKEIHDKAQVAEIMKNYQYLSFARVADYEKHKKDLKILKRVVKKHFEPTVYDKLFRSEENGTYSAYVNSFNSEEKSRRNYKERKQEDLYNSIKKLLKSVDNVDDTDIEYIKNEMDKENFLPKQLTFKNGVIPNQIHASELKAILKNAEKYLPFLNEKDESGYTVSERILMLFSFQIPYYVGPVSSNSNGWVKRLESGQVLPWNIDKKIDLKETSEQFIQRMVRNCTYIAGEKVLPKASLLYENFKVLNEINNLSINGERIAVALKQDLYNTLFLKGKRVTRKQIFNYFHSRGLVEEDSQISGIDIAVNNSLSTYGKFLPLFGEHLKEDKYKKMVDDIVFWCTVYGDSRKFLREQLEEKYSDVLDENQIKRITGMKFKDWGNLSKEFLELLGCCKSTGEMIPLIRAMWETNYNLMELLHSEEFTYSEELEEKQGKIEKVLSEYTIDDLNEEYFSAPVKRMVWQTLLIIKEIEKIMKCPPTRIFVEMTRKDDEKGDNGRKSSRKDQLLALYKKIQSEDKEWKKEMSSRIEDYDKNGALRSKKLYLYFIQKGLDMYTGKPIDLDNLMSANSNYDIDHIYPRHFVKDDNINNNLVLASKPANAEKSDIYPIKDSIYQKMKYTWKVLRDEGLITEEKYKRLTGRNPFTDEQKAGFIARQLVETGQGTKGVADLLTALLPDTKLVYSKAGNVSDFRKRYDIPKSRLINDFHHAHDAYLNIVVGNIYFTKFTSNPLNYIRKECSSKDNKYQYNLGNMYKWDVKRDGKTAWIAAKEGETGTLATVKKMLSRNTPILTRLAIEGHGGIADATLYSHKKAKQDAYIPLKSSDARMADVTKYGGYSSVTTAYLFLVEHEIKGKKIRTLETVPLYLKDRLENSKEKLEEYCRETLGYTNPSVRMKKIKLQSLIKLNGYYMQISGKTNKQFTVRNYVQFCLNSKWVDYIHKLEKYQDKGVIDDAITDEKNVELYNVLCEKHSVGIFTLRPNPVGDKIKKGYDKFVNLTTEEQIKLLIEIIKLTCVGIVSANLTLIGGASISGKMLISKNITDAKECLLINQSVTGLYENRIDLLRV

SEQ ID NO: 3184 - protein, 1358 aa, unidentified
  REGION 1..1358: note = Category: MG91 effectors
  REGION 1..1358: note = Description: MG91-376 effector
  source 1..1358: note = uncultivated organism sequence
MEKEYYLGLDMGTNSVGWAVTDDAYNLIRFKGKDMWGIREFDEANPAVERRTHRTSRRREQRNAVRMGLIRSYFADEIQKVDSNFYQRLDNSFFHVEDKQDNVKDKNGIFNDKNYKDADYYKQYPTIFHLRKELIEDASQKDVRLVYLAVANMFKHRGHFLLSGIGSESSKQTITDLYNQVSGLITEEYGISLKTDIAGTDFEQVLCSREYSRTRKSEKVCEILEIKNSDKLKKAFVKSMCGLSVKITDIIDDTFTEISDEDKKITFSFVDSDYDEKAGVLEEKLGTDVYDIISKLKEIHDKAQVAEIMKNYQYLSFARVADYEKHKKDLKILKRVVKKYFEPTVYDKLFRSEENGTYSAYVNSFNSEEKSRRNYKERKQEDLYNSIKKLLKSVDNVDDTDIEYIKNEMDKENFLPKQLTFKNGVIPNQIHASELKAILKNAEKYLPFLNEKDESGYTVSERILMLFSFQIPYYVGPVSSNSNGWVKRLEPGQVLPWNIDKKIDLKETSEQFIQRMVRNCTYIAGEKVLPKASLLYENFKVLNEINNLSINGERITVNLKQDLYNTLFLKGKRVTRKQIFNYFHSRGLVEEDSQISGIDIAVNNSLSTYGKFLPLFGEHLKEDKYKKMVDDIVFWCTVYGDSRKFLREQLEEKYSDVLDENQIKRITGMKFKDWGNLSKEFLELSGCCKSTGEVMPLIRAMWETNYNLMELLHSEEFTYSEELEEKQGKIEKVLSEYTIDDLNEEYFSAPVKRMVWQTLLIIKEIEKIMKCPPTRIFVEMTRKDDEKGDNGRKSSRKDQLLALYKKIQSEDKEWKKEMSSRIEDYDKNGALRSKKLYLYFIQKGLDMYTGKPIDLDNLMSANSNYDIDHIYPRHFVKDDNINNNLVLASKPANAEKSDIYPIKDSIYQKMKYTWKVLRDEGLITEEKYKRLTGRNPFTDEQKAGFIARQLVETGQGTKGVADLLTALLPDTKLVYSKAGNVSDFRKRYDIPKSRLINDFHHAHDAYLNIVVGNIYFTKFTSNPLNYIRKECSSKDNKYQYNLGNMYKWDVKRDGKTAWVAPEEGETGTLATVKKMLSRNTPILTRLTIEGHGGIADATLYSHKKAKQDTYIPLKSSDARMADVTKYGGYSSVTTAYLFLVEHEIKGKKIRTLETVPIYLKDRLENSKEKLEEYCRETLGYTNPSVRMKKIKLQSLIKLNGYYMQISGRTGNRFTLRNYVQLCLNGKWVDYIHKLEKYQDKGVIDDLITDERNVELYNVLCEKHSVGIFTLRPNLVGDKIKNGYDKFVNLTTEEQIKLLIEIIKLTCVGIVSANLTLIGGAAISGKMLMSKNITYANECILINQSVTGLYENRIDLLGV

SEQ ID NO: 3185 - protein, 1358 aa, unidentified
  REGION 1..1358: note = Category: MG91 effectors
  REGION 1..1358: note = Description: MG91-377 effector
  source 1..1358: note = uncultivated organism sequence
MEKEYYLGLDMGTNSVGWAVTDDAYNLIRFKGKDMWGIREFDEANPAVERRTHRTSRRREQRNAVRMGLIRSYFADEIQKVDSNFYQRLDNSFFHVEDKQDNVKDKNGIFNDKNYKDADYYKQYPTIFHLRKELIEDASQKDVRLVYLAVANMFKHRGHFLLSGIGSESSKQTITDLYNQVSGLITEEYGISLKTDIAGTDFEQVLCSREYSRTRKSEKVCEILEIKNSDKLKKAFVKSMCGLSVKITDIIDDTFTEISDEDKKITFSFVDSDYDEKAGVLEEKLGTDVYDIISKLKEIHDKAQVAEIMKNYQYLSFARVADYEKHKKDLKILKRVVKKYFEPTVYDKLFRSEENGTYSAYVNSFNSEEKSRRNYKERKQEDLYNSIKKLLKSVDNVDDTDIEYIKNEMDKENFLPKQLTFKNGVIPNQIHASELKAILKNAEKYLPFLNEKDESGYTVSERILMLFSFQIPYYVGPVSSNSNGWVKRLEPGQVLPWNIDKKIDLKETSEQFIQRMVRNCTYIAGEKVLPKDSLLYENFKVLNEINNLSINGERITVNLKQDLYNTLFLKGKRVTRKQIFNYFHSRGLVEEDSQISGIDIAVNNSLSTYGKFLPLFGEHLKEDKYKKMVDDIVFWCTVYGDSRKFLREQLEEKYSDVLDENQIKRITGMKFKDWGNLSKEFLELSGCCKSTGEVMPLIRAMWETNYNLMELLHSEEFTYSEELEEKQGKIEKVLSEYTIDDLNEEYFSAPVKRMVWQTLLIIKEIEKIMKCPPTRIFVEMTRKDDEKGDNGRKSSRKDQLLALYKKIQSEDKEWKKEMSSRIEDYDKKGALRSKKLYLYFIQKGLDMYTGKPIDLDNLMSANSNYDIDHIYPRHFVKDDNINNNLVLASKPANAEKSDIYPIKDSIYQKMKYTWKVLRDEGLITEEKYKRLTGRNPFTDEQKAGFIARQLVETGQGTKGVADLLTALLPDTKLVYSKAGNVSDFRKKYDIPKSRLINDFHHAHDAYLNIVVGNIYFTKFTSNPLNYIRKECSSKDNKYQYNLGNMYKWDVKRDGKTAWIAAKEGETGTIATVKKMLSRNTPTLTRLTIEGHGGIADATLYSHKKAKQDAYIPLKSSDARMADVTKYGGYSSVTTAYLFLVEHEIKGKKIRTLETVPLYLKDILENSKEKLEEYCRETLGYTNPSVRMKKIKLQSLIKLNGYYMQISGKTNKQFTVRNYVQFCLNSKWVDYIHKLEKYQDKGVIDDAITDEKNVELYNVLCEKHSVGIFTLRPNPVGDKIKKGYDKFVNLTTEEQIKLLIEIIKLTCVGIVSANLTLIGGASISGKMLISKNITDAKECLLINQSVTGLYENRIDLLRV

SEQ ID NO: 3186 - protein, 1358 aa, unidentified
  REGION 1..1358: note = Category: MG91 effectors
  REGION 1..1358: note = Description: MG91-378 effector
  source 1..1358: note = uncultivated organism sequence
MEKEYYLGLDMGTNSVGWAVTDDAYNLIRFKGKDMWGIREFDEANPAVERRTHRTSRRREQRNAVRMGLIRSYFADEIQKVDSNFYQRLDNSFFHVEDKQDNVKDKNGIFNDKNYKDADYYKQYPTIFHLRKELIEDASQKDVRLVYLAVANMFKHRGHFLLSGIGSESSKQTITDLYNQVSGLITEEYGISLKTDIAGTDFEQVLCSREYSRTRKSEKVCEILEIKNSDKLKKAFVKSMCGLSVKITDIIDDTFTEISDEDKKITFSFVDSDYDEKAGVLEEKLGTDVYDIISKLKEIHDKAQVAEIMKNYQYLSFARVADYEKHKKDLKILKRVVKKYFEPTVYDKLFRSEENGTYSAYVNSFNSEEKSRRNYKERKQEDLYNSIKKLLKSVDNVDDTDIEYIKNEMDKENFLPKQLTFKNGVIPNQIHASELKAILKNAEKYLPFLNEKDESGYTVSERILMLFSFQIPYYVGPVSSNSNGWVKRLEPGQVLPWNIDKKIDLKETSEQFIQRMVRNCTYIAGEKVLPKASLLYENFKVLNEINNLSINGERITVNLKQDLYNTLFLKGKRVTRKQIFNYFHSRGLVEEDSQISGIDIAVNNSLSTYGKFLPLFGEHLKEDKYKKMVDDIVFWCTVYGDSRKFLREQLEEKYSDVLDENQIKRITGMKFKDWGNLSKEFLELSGCCKSTGEMIPLIRAMWETNYNLMELLHSEEFTYSEELEEKQGKIEKVLSEYTIDDLNEEYFSAPVKRMVWQTLLIIKEIEKIMKCHPTRIFIEMTRKDDEKGDNGRKSSRKDQLLALYKKIQSEDKEWKKEMSSRIEDYDKNGALRSKKLYLYFIQKGLDMYTGKPIDLDNLMSANSNYDIDHIYPRHFVKDDNINNNLVLASKPANAEKSDIYPIKDSIYQKMKYTWKVLRDEGLITEEKYKRLTGRNPFTDEQKAGFIARQLVETGQGTKGVADLLTALLFDTKLVYSKAGNVSDFRKRYDIPKSRLINDFHHAHDAYLNIVVGNIYFTKFTSNPLNYIRKECSSKDNKYQYNLGNMYKWDVKRDGKTAWIAAKEGETGTIATVKKMLSRNTPTLTRLTIEGHGGIADATLYSHKKAKQDAYIPLKSSDARMADVTKYGGYSSVTTAYLFLVEHEIKGKKIRTLETVPLYLKDRLENSKEKLEEYCRETLGYTNPSVRMKKIKLQSLIKLNGYYMQISGKTNKQFTVRNYVQFCLNSKWVDYIHKLEKYQDKGVIDDAITDEKNVELYNVLCEKHSVGIFTLRPNPVGDKIKKGYDKFVNLTTEEQIKLLIEIIKLTCVGIVSANLTLIGGASISGKMLISKNITDAKECLLINQSVTGLYENRIDLLRV

SEQ ID NO: 3187 - protein, 1358 aa, unidentified
  REGION 1..1358: note = Category: MG91 effectors
  REGION 1..1358: note = Description: MG91-379 effector
  source 1..1358: note = uncultivated organism sequence
MEKEYYLGLDMGTNSVGWAVTDDAYNLIRFKGKDMWGIREFDEANPAVERRTHRTSRRREQRNAVRMGLIRSYFADEIQKVDSNFYQRLDNSFFHVEDKQDIVKDKNGIFNDKNYKDADYYKQYPTIFHLRKELIEDASQKDVRLVYLAVANMFKHRGHFLLSGIGSESSKQTITDLYNQVSGLITEEYGISLKTDIAGTDFEQVLCSREYSRTRKSEKVCEILEIKNSDKLKKAFVKSMCGLSVKITDVIDDTFTEISDEDKKITFSFVDSDYDEKAGVLEEKLGTDVYDIISKLKEIHDKAQVAEIMKNYQYLSFARVADYEKHKKDLKILKRVVKKYFEPTVYDKLFRSGENGTYSAYVNSFNSGEKSRRNYKERKQEDLYNSIKKLLKYIDNVCDTDIEYIKNEIEKENFLPKQLTFKNGVIPNQIHASELKAILKNAEKYLPFLNEKDESGYTVSERILMLFSFQIPYYVGPVSPNSNGWVKRLEPGQVLPWNIDKKIDLKETSEQFIQRMVRNCTYIAGEKVLPKASLLYENFKVLNEINNLSINGERIAVALKQDLYNTLFLKGKRVTRKQIFNYFHSRGLVEEDSQISGIDIAVNNSLSTYGKFLPLFGEHLKEDKYKKMVDDIVFWCTVYGDSRKFLREQLEEKYSDVLDENQIKRITGMKFKDWGNLSKEFFELLGCCKSTGEMIPLIRAMWETNYNLMELLHSEEFTYSEELEEKQGKIEKVLSEYTIDDLNEEYFSAPVKRMVWQTLLIIKEIEKIMKCPPTRIFVEMTRKDDEKGDNGRKSSRKDQLLALYKKIQSEDKEWKKEMSSRIEDYDKNGALRSKKLYLYFIQKGLDMYTGKPIDLDNLMSANSNYDIDHIYPRHFVKDDNINNNLVLASKPANAEKSDIYPIKDSIYQKMKYTWKVLRDEGLITEEKYKRLTGRNPFTDEQKAGFIARQLVETGQGTKGVADLLTALLPDTKLVYSKAGNASDFRKKYDIPKSRLINDFHHAHDAYLNIVVGNIYFTKFTSNPLNYIRKECSSKDNKYQYNLGNMYKWDVKRDGKTAWIAAKEGETGTLATVKKMLSRNTPILTRLAIEGHGGIADATLYSHKKAKQDAYIPLKSSDARMADVTKYGGYSSVTTAYLFLVEHEIKGKKIRTLETVPLYLKDRLENSKEKLEEYCRETLGYTNPSVRMKKIKLQSLIKLNGYYMQISGKTNKQFTVRNYVQFCLNSKWVDYIHKLEKYQDKGVIDDAITDEKNVELYNVLCEKHSVGIFTLRPNPVGDKIKKGYDKFVNLTTEEQIKLLIEIIKLTCVGIVSANLTLIGGAAISGKMLISKNITDAKECLLINQSVTGLYENRIDLLRV

SEQ ID NO: 3188 - protein, 1352 aa, unidentified
  REGION 1..1352: note = Category: MG91 effectors
  REGION 1..1352: note = Description: MG91-380 effector
  source 1..1352: note = uncultivated organism sequence
MTAFKYYLGLDMGTNSVGWAATDPGYRLLKAKGKDLWGIREFNEASGAVERRTHRISRRRRQREQVRIGILKDYFHDAICEVDPGFFRRLENSKYHEEDKDVEVRYKNNIFNDSNYTDKDYFNEYPTIYHLRNELISSTEKHDVRLVFLALLNMFKHRGHFLNAGLGENNGESNIDNVYFELTELLSELTEYHLSQDIDCKQIEAILSRRDMSRTHKAEELAGVLHVDLKNKPYKELIRGLCGLKFNACVVFPDVQSEEVTKLDICLSESTFDEKSDEIANIIGEDYFEIIMAMKEMFDIGSLASIMKGHNYLSQARVASYTKHKEDLKLLKEVIKKYCGKKEYDKFFNSDADGSYASYVGSYNSKNKERRVGNKRTSEELYKEIKKLLKDAQKEDENVQKILTSIENETFLPKQLTASNGVIPNQVHAREMKKILSNAENYLPFLTEKDETGLSVSERILKLFTFQIPYYVGPTSENSGKNGGNGWVVRREDGQVLPWNIDEKIDMKATSEAFISRMVRRCTYISGEQVLPKASLEYQSYCVLNEINNIKIDGERISVELKQDIYKAVFQKGKKVTKKQLCKYLHTRGIIETEEQVTGVDVSINNALTTYGKFKPIFGEDISKDSVQKMIEDIVFWCTVYGDSKKFLKDRIEEKYGNKLSEEQIKRILGFKFKDWGNLSKKFLELNGADTSTGESISIIRALWNNNLNLMELINSSLYNYKECLAEYQNTMLKTLSEIEAEDLNEYYFSAPVRRIIWQTILVIKELVKVLGCEPERIFVEMTRKPDEHKTRTSSRRNKFEELYKKVKDEATDWMQVIAKAEEDGKIRSKKMYLYLTQKGRCMYTGKHIELDDLFDKNLYDIDHIYPRHFVKDDNIDNNLVLVCKEKNAHKSDHYPIEEEIFLSQKKMWLELRKSGFITEEKYNRLMGRSPFSDEQKAGFIARQLVETSQGTKGVANILRQLLPGSKIVYAKASNVSEFRHTRDDIPKSRLVNDFHHAHDAYLNIVVGNVYYVKFTQNPLNFIKKDYDKYKEDYNLSKMFDWDVKRNGEVAWIAQRKDGEAGTITTVKRMLSRNTPLMTRYSFEGKGGLANETLCSAKKAKGEGYIPFKSSDDKMQDVTKYGGFTKVTGAYFFLVEHTEKKKRIRTIESVPVYLAQKIEQNPDELKKYCEEILGLVDADIRLKKIKIGSLIKRNGYFCYITGKTGNRLSVRNAVNLCLKNEWIKYISKLEKVKEKDAVDEIITKEKNEVLYSELIQKFKHGIFSKRPNPVEDKLEKGSEKFSNLSIKEQCAVLCQILQLAAVLGSECDMTLLGESAHCGKMLISKKIGDEEIYLLNQSVTGLYEKKINLHTV

SEQ ID NO: 3189 - protein, 1358 aa, unidentified
  REGION 1..1358: note = Category: MG91 effectors
  REGION 1..1358: note = Description: MG91-381 effector
  source 1..1358: note = uncultivated organism sequence
MEKEYYLGLDMGTNSVGWAVTDDAYNLIRFKGKDMWGIREFDEANPAVERRTHRTSRRREQRNAVRMGLIRSYFADEIQKVDSNFYQRLDNSFFHVEDKQDNVKDKNGIFNDKNYKDADYYKQYPTIFHLRKELIEDASQKDVRLVYLAVANMFKHRGHFLLSGIGSESSKQTITDLYNQVSGLITEEYGISLKTDIAGTDFEQVLCSREYSRTRKSEKVCEILEIKNSDKLKKAFVKSMCGLSVKITDIIDDTFTEISDEDKKITFSFVDSDYDEKAGVLEEKLGTDVYDIISKLKEIHDKAQVAEIMKNYQYLSFARVADYEKHKKDLKILKRVVKKYFEPTVYDKLFRSEENGTYSAYVNSFNSEEKSRRNYKERKQEDLYNSIKKLLKSVDNVDDTDIEYIKNEMDKENFLPKQLTFKNGVIPNQIHASELKAILKNAEKYLPFLNEKDESGYTVSERILMLFSFQIPYYVGPVSSNSNGWVKRLESGQVLPWNIDKKIDLKETSEQFIQRMVRNCTYIAGEKVLPKASLLYENFKVLNEINNLSINGERITVNLKQDLYNTLFLKGKRVTRKQIFNYFHSRGLVEEDSQISGIDIAVNNSLSTYGKFLPLFGEHLKEDKYKKMVDDIVFWCTVYGDSRKFLREQLEEKYSDVLDENQVKRITGMKFKDWGNLSKEFLELSGCCKSTGEMIPLIRAMWETNYNLMELLHSEEFTYSEELEEKQGKIEKVLSEYTIDDLNEEYFSAPVKRMVWQTLLIIKEIEKIMKCHPTRIFIEMTRKDDEKGDNGRKSSRKDQLLALYKKIQSEDKEWKKEMSSRIEDYDKNGALRSKKLYLYFIQKGLDMYTGKPIDLDNLMSANSNYDIDHIYPRHFVKDDNINNNLVLASKPANAEKSDIYPIKDSIYQKMKYTWKVLRDEGLITEEKYKRLTGRNPFTDEQKAGFIARQLVETGQGTKGVADLLTALLPDTKLVYSKAGNVSDFRKRYDIPKSRLINDFHHAHDAYLNIVVGNIYFTKFTSNPLNYIRKECSSKDNKYQYNLGNMYKWDVKRDGKTAWIAAKEGETGTIATVKKMLSRNTPTLTRLTIEGHGGIADATLYSHKKAKQDAYIPLKSSDARMADVTKYGGYSSVTTAYLFLVEHEIKGKKIRTLETVPLYLKDRLENSKEKLEEYCRETLGYTNPSVRMKKIKLQSLIKLNGYYMQISGKSIKQFEVRNYVQICLNGKWVDYIHKLEKYQDKGVIDNAITDEKNVELYNILCEKHSVGIFTLRPNPVGDKIKKGYDKFVNLTTEEQIKLLIEIIKLTCVGIVKADLRLIGASEKSGTMKINKNITDAKECFLINQSVTGLYENRIDLLRV

SEQ ID NO: 3190 - protein, 1022 aa, unidentified
  REGION 1..1022: note = Category: MG91 effectors
  REGION 1..1022: note = Description: MG91-382 effector
  source 1..1022: note = uncultivated organism sequence
MKSSIKKYCTKEEYNNFFNSDADGSYASYIGSFNSGNKERRVGSKRTSEDLYKEIKKLLKGANKSDPAINEIFTSIETESFLPKQLTASNGIIPNQVHSKEMARILTNAENYLPFLKETDENNLSISNRILQLYKFQIPYYIGPVTEKSQRDGGNGWVIRKDNGRVFPWNIEEKIDVKATSEAFISRMVRRCTYMNGKQVLPKASLEYESFRVLNEINNLRIDGERIPVTLKQDIYTDLFQKGKKVTKKQLCNYLATRGLIESSEQVTGIDIAINNSLSTYGKFKAIFGEDIKLDHIQHMIDDIVFWCTVYGDSKQFLKEQIEDKYKGKLSPEQMKRILGFKFKDWGNLSKEFFELKGADKSTGEAVSIIRALWENNLNLMELINSPEFDFKEQLADYEANSLKTLSDFEPEDLNDYYFSAPVRRMIWQTTLIIKELVHVLGKEPARIFIEMTREKDASRGRTLSRKKKFEDLYKNVKDENTDWAKVIEHADESGTIRSKKMYLYLTQKGRCMYTGNHIELSDLFNDNLYDIDHIYPRHFVKDDNIDNNLVLVTKEKNAHKSDNYPLEAEIFNKQRNMWTQLRKEGFISEEKYNRLMGRNAFTDEQKAGFIARQLVETSQGTKGVAELFHQLLPNSKIVYAKAGNVSDFRRNREFPKSRLVNDFHHAHDAYLNIVVGNVYYVKFTQNPINYIKNSYNKDMNKNNYNLSRMFDWDVKRGDEVAWIAQKQDGAAGTISTVKKMLSKNTPLMTRLSYEGKGALANETLYSAEKAKGEGYIPFKSSDTKIQDVTKYGGFTSVTGAYFFLVEHDEKKKRIRTIESVPLYLADKIDKDSSELERYCDKLGLVNYDVRVRKIKIGSLIKYNGYFCYITGKTGYRLIVRNATNLCLASNWRKYIKKIEKYKETTIIDNVITAEENIKLYNELLNKFTVGIFGRRPNPIGEKMDSARDKFASLSIENQCLALYQILQLTAILGNESDLQLIGASTHAGKMLISKKIGTDEIYLINQSPTGLFETKIDLQTI

SEQ ID NO: 3191 - protein, 1342 aa, unidentified
  REGION 1..1342: note = Category: MG91 effectors
  REGION 1..1342: note = Description: MG91-383 effector
  source 1..1342: note = uncultivated organism sequence
MRYFMGLDMGTSSVGWAVTDEHYQLLRRKGKDMWGIREFEEAATAVERRTHRVSRRRRQRQVARIGLLQEYFHDAIHQVDPNFYQRLKNSKYHEEDKDEIVRESNGIFNDAEYTDKEYFKEFPTIFHLRQELIKSKEPHDVRLVYLALLNMFKHRGHFLNATLSADGESRKIKDIYTDFVDKAAEQLGVSFATDIRYEELENYLSSNDLSRKRKGELIAELLHVTRKDKQQYALIECMLGLDKSVKLMFGDTLPEDFDKTIKVNFSDIAFEEKATEISEAIGEEKYDLILIMKEIYDAAILNRIMNGYTYLSDARVAEYEKHKSDLACLKHYIKEYGTQQQFDFLFRGTEKGSYSAYVHSVNSHEKQRRNMAGNKKEDLYSALKKMLKDMPENEEKTCIMMQIELDNFLPKQLTASNGVIPNQIHLKEMKKILANAENYLPFLKEKDESGYTVSERIQKLFAFQIPYYIGPTTEKSAEFGGNGWVVRKEEGKVLPWNIDQKIDMKKTSEKFISRMVRRCTYMNDEQVLPKESLEYESFCVLNELNNIKVYGEKLPVDIKQDIYRTLCEKGKRVTKKSLMQYLVGRGVIKAEDEEQLTGLMDGLNNTLKSFAKFKAIFGDAIYEDSCKKMVEQIIFWCTVYGDSKHFLKEQLLEKYGEVLTGAQIKRILGIKFRDWGNLSKKFLELQGCSKETGEVNSLIRMLWETNDNLMELLAQDSYTFKEELENMQESTYKVLTELQPEDLDHMYFSAPVKRMIWQTILIIKEVTKVMGCQPERLFIEMTREHGQKNDIKDSRAKKFYELYSKIKDEDKDWRKVIEDADKDGRIRSKKMYLYLTQMGRCMYTGRPIDLDQLFNNNLYDIDHIYPRHYVKDDNLENNMVLVEKQSNAHKSDVYPLESGIYEKQVNWWRELHRKNLINDEKLKRLTGRNPFTDEQKAGFIARQLVETSQGTKGVATILQEALPDTTLVYAKARNVSEFRSDNDLLKSRIVNDFHHAHDAYLNIVIGNVYYVKFTKNPINFIREHGTYNLGKMFAKDVKRGDDIGWVAQSGNGQTATMETIKRTMARNTPLLTRMSYEVTGGLANQTLYSASKAKEGTYIPLKSSDERMQDVTKYGGFTSVSTAYFMLVEHDGKKGKRIRTIESVPIMWKERIEKNPAELERYCLDVLKLSNPDIRVRKILIQSLIKRNGYYMQITGKTGNRMYVRNMVSLCLVQDWVNYIKKLEKDKDENISKEKNIRLYDVLMDKHINTIYNTRPNPVGDLLIKRRSDFIELKITDQVIILLEILKLTQTALGSANLKLIGEAEKTGVMLISKDITALDEMLLINQSVTGLYEQRVNLLTV

SEQ ID NO: 3192 - protein, 1299 aa, unidentified
  REGION 1..1299: note = Category: MG91 effectors
  REGION 1..1299: note = Description: MG91-384 effector
  source 1..1299: note = uncultivated organism sequence
MTAFKYYLGLDMGTNSVGWAATDPEYRLLKAKGKDLWGIREFNEASGAVERRTHRISRRRRQREQVRIGILKDYFHDAICEVDPSFFRRLENSKYHEEDKDVEVRYKNNIFNDGNYTDKDYFNEYPTIYHLRNELISSTEKHDVRLVFLALLNMFKHRGHFLNAGLGENNGESNIDNAYFELTELLSELTEYHLSQDIDCKQIEAILSRRDMSRTHKAEELAGVLHVDLKNKPYKELIRGLCGLKFNACVVFPDVQSEEVTKLDICLSESSFDEKSDEIANIIGEDYFEIIMAMKEMFDIGSLASIMKGHNYLSQARVASYTKHKEDLKLLKEVIKKYCGKKEYDKFFNSDADGSYASYVGSYNSKNKERRVGNKRTSEELYKEIKKLLKDAPKEDENVQKILTSIENETFLPKQLTASNGVIPNQVHAREMKKILSNAENYLPFLTEKDETGLSVSERILKLFTFQIPYYVGPTSENSGKNGGNGWVVRREDGQVLPWNIDEKIDMKATSEAFISRMVRRCTYISGEQVLPKASLEYQSYCVLNEINNIKIDGERISVELKQDIYKAVFQKGKKVTKKQLCKYLHTRGIIETEEQVTGVDVSINNALTTYGKFKPIFGEDISKDSVQKMIEDIVFWCTVYGDSKKFLKDRIEEKYGNKLSEEQIKRILGFKFKDWGNLSKKFLELNGADTSTGESISIIRALWNNNLNLMELINSSLYNYKECLAEYQNTMLKTLSEIEAEDLNEYYFSAPVRRMIWQTILVIKELVKVLGCEPERIFVEMTRRPDEHKTRTSSRRNKFEELYKKVKDEATDWMQVIAKAEEDGKIRSKKMYLYLTQKGRCMYTGKHIELDDLFDKNLYDIDHIYPRHFVKDDNIDNNLVLVCKEKNAHKSDHYPIEEEIFLSQKKMWLELRKSGFITEEKYNRLMGRSPFSDEQKAGFIARQLVETSQGTKGVANILRQLLPGSKIVYAKASNVSEFRHTRDDIPKSRLVNDFHHAHDAYLNIVVGNVYYVKFTQNPLNFIKKDYDKYKEDYNLSKMFDWDVKRNGEVAWIAQRKDGEAGTITTVKRMLSRNTPLMTRYSFEGKGGLANETLCSAKKAKGEGYIPFKSSDDKMQDVTKYGGFTSVTGAYFFLVEHTEKKKRIRTIESVPVYLAQKIEQNPDELKKYCEEILGLIDADIRLKKIKIGSLIKRNGYFCYITGKTGNRLIVRNAVNLCLKNEWIKYISKLEKVKEKDAVDKIITKEKNEVLYSELIQKFKHGIFSKRPNPVGDKLEKDSEKFNNLSIKDQCAVLCQVLRI

SEQ ID NO: 3193 - protein, 1352 aa, unidentified
  REGION 1..1352: note = Category: MG91 effectors
  REGION 1..1352: note = Description: MG91-385 effector
  source 1..1352: note = uncultivated organism sequence
MTAFKYYLGLDMGTNSVGWAATDPGYRLLKAKGKDLWGIREFNEASGAVERRTHRISRRRRQREQVRIGILKDYFHDAICEVDPGFFQRLENSKYHEEDKDVEVRYKNNIFNDSNYTDKDYFNEYPTIYHLRNELISSTEKHDVRLVFLALLNMFKHRGHFLNAGLGENNGESNIDNAYFELTELLSELTEYHLSQDIDCKQIEAILSRRDMSRTHKAEELAGVLHVDLKNKPYKELIRGLCGLKFNACVVFPDVQSEEVTKLDICLSESTFDEKSDEIANIIGEDYFEIIMAMKEMFDIGSLASIMKGHNYLSQARVASYTKHKEDLKLLKEVIKKYCSKKEYDKFFNSDADGSYASYVGSYNSKNKERRVGNKRTSEELYKEIKKLLKDAQKEDENVQKILTSIENETFLPKQLTASNGVIPNQVHAREMKKILSNAENYLPFLTEKDETGLSVSERILKLFTFQIPYYVGPTSENSGKNGGNGWVVRREDGQVLPWNIDEKIDMKATSEAFISRMVRRCTYISGEQVLPKASLEYQSYCVLNEINNIKIDGERISVELKQDIYKAVFQKGKKVTKKQLCKYLHTRGIIETEEQVTGVDVSINNALTTYGKFKPIFGEDISKDSVQKMIEDIVFWCTVYGDSKKFLKDRIEEKYGNKLSEEQIKRILGFKFKDWGNLSKKFLELNGADTSTGESISIISALWNNNLNLMELINSSLYNYKECLAEYQNTMLKTLSEIEAEDLNEYYFSAPVRRMIWQTILVIKELVKVLGCEPERIFVEMTRKPDEHKTRTSSRRNKFEELYKKVKDETTDWMQVIANAEEDGKIRSKKMYLYLTQKGRCMYTGKHIELDDLFDNNLYDIDHIYPRHFVKDDNIDNNLVLVCKEKNAHKSDHYPIEEEIFLSQKKMWLELRKSGFITEEKYNRLMDRNPFSDEQKAGFIARQLVETSQGTKGVANILRQLLPGSKIVYAKASNVSEFRCTRDDIQKSRLVNDFHHAHDAYLNIVVGNVYYVKFTQNPLNFIKKDYDKYKEDYNLSKMFDWDVKRNGEVAWIAQRKDGAAGTITTVKRMLSRNTPLMTRYSFDGKGGLTNETLYSAKKAKGEGYIPFKSSDDKMQDVTKYGGFTSVTGAYFFLVEHTEKKKRIRTIESVPVYLAQKIEQNPDELKKYCEEILGLIDADIRLKKIKIGSLIKRNGYFCYITGKTGNRLIVRNAVNLCLKNEWIKYISKLEKVKEKDAVDKIITKEKNEVLYSELIQKFKHGIFSKRPNPVGDKLEKDSEKFNNLSIKDQCAVLCQVLRMAAILGSECDMTLLGDSPNCGKMLISKKIGDEEIYLINQSVTGLYEKKINLHTV

SEQ ID NO: 3194 - protein, 1138 aa, unidentified
  REGION 1..1138: note = Category: MG91 effectors
  REGION 1..1138: note = Description: MG91-386 effector
  source 1..1138: note = uncultivated organism sequence
MVKYKIENLERKMSKKILSLDLGITSVGYSVLEELEKDKYSLIDYGVSMFDKPIDKDGKSKKLLHSSIKSTTKLYNLRKQRVKKLAHLFEKYNLGLATELLNQEKENRYPNKWRLRAKKVFEQKLTVGELFTILYLIAKHRGYKSLDSDDLLEELLLELGFEIEEKKSKKDDEKGKIKKALKTIEELIVKNPHKTVAQIIYEEEIIKDNPTFRNHDNYNYMIRRQHIKEEIEKIVVAQYEFGLFENDFEVKSFIKELIESIDDQKDSSNDLSLFGNCQYYPEFKVAHQYSLLSDIFKMYESVSNITLNKTKITKEQIEMVANWFFKKIEQGKNFSEIKYQDIRVVLKLSDEVKIFGKEDYYLDKKGKRVHHTITKFHFLSSLGKIDNGFIKVLFQKANSLEILDEIFDILKTEKSPKTIYSKLTDTFLRYDLIEDKKIRDETVINLIKNKSGKSLNISAYAMRKFIPYFKDGLSTDEIKEKLNLNRDENYANFKKWIKYLHIKNYEKDDNLEINNHPVKYVVSATIRVIKHLHSTYGVFDEIRVESTRELSQNEETKKAIEKANKENEKKFKEILENKEYQKIASDYGKNLKKYARKIILWEEQDKLDIYSGKVIDFDDIFSNRVDIDHIIPQSLGGLSVKHNLVLAHRDENVKKSNQLPMNFIKNKDDFVKRVEYLFSEHKINWKKRKNLLATTLDEAYQDTFESKSLRATSYIEALTAQMLKRYYPFPSKNKQRDGSAVRHIQGRATSNIRKLLGIKSKVRNTNIHHAIDAILIGLTNHSWLQKLSNTFRENIGVIDDEARAKIKKQIPIIEGIEPKELVELIESVYNIYGEESIFYKDIFGNTKSINFWVSKKPMSSKIHKDTIYAKKPNGIFTVREDIIKQFVGLKVTVKTEPKKFIESFEKKIANKIYVCKINPKDIICQIIKERAKEIELLLKSFVTLNHKDKEQISQAKEKLDTLIHKPLIDNNGNIIRKVKFYQTNLTGFDIRGGLAVTEKTFIGFKAIKGDKKIEYKRVDASNFQKIKKENDGSFKVYKNDIVFFIFSDATYKGGRVVSFLEDKKIVAFSNPRFAPNAKSQPISFVTIFKGEPYSHKQHSINKAIGIIKINLDILGNIKSYQKFGEVSKEIEAKILHME

SEQ ID NO: 3195 - protein, 623 aa, unidentified
  REGION 1..623: note = Category: MG91 effectors
  REGION 1..623: note = Description: MG91-387 effector
  source 1..623: note = uncultivated organism sequence
MYICSRLHSYTIVSETFVLTLPLKVEKWQADILDKRYELLRHTYNMVQQKLLRQYIYFSQQKAFKACKNFQQKREFFVSHPFHFRGINGKNGEPSDIKFPYTFESRSSNSGKRPSGGISDYVSKLWSHRIGQDKTLSNLGINSYILEELGLHIMKAWETRLYVPKSSRISFREFGDINSFGSRYKKGNFAGFTINLEEGFITYNTNGRKGEKANLVKLPIDFSREKKSYAVEALKGGKDSIRKLLIVRRQIRGRNKYYLQFTINGEKPQKGRTLGIGNVGIDIGPSTIATSSLQGVHFDKLADKCDNIEHELYLVNRKLDRSRRANNPQNYNADGTIKRGVRLVWKKDKEVKRYATLKMLRRELYRKQAEIRKQQHLEMANTMLSQGDTFIVENNPIDAWVRRAKDTTKTKTGRNRCKKRYGKSVANHAPAMFVSLLKNKVLSLGGHFYEVDTRYAATQFDFINGVRTKHEVSERSITLSNGRTHHRDMLSAFNLQHIKLESIGTEDRDYDIKQMEADYPIFCKLETTEQERFKEARRNERDALYFVGAAEKQLRRKPQEETVANRHNGGVGRKHCNTRLGSSIKENAKITGSGLVRESIERISQVPNEYHHAGSHPIILDGL

SEQ ID NO: 3196 - protein, 1352 aa, unidentified
  REGION 1..1352: note = Category: MG91 effectors
  REGION 1..1352: note = Description: MG91-388 effector
  source 1..1352: note = uncultivated organism sequence
MTAFKYYLGLDMGTNSVGWAATDPGYRLLKAKGKDLWGIREFNEASGAVERRTHRISRRRRQREQVRIGILKDYFHDAICEVDPSFFQRLENSKYHEEDKDVEVRYKNNIFNDSNYTDKDYFNEYPTIYHLRNELISSTEKHDVRLVFLALLNMFKHRGHFLNAGLGENNGESNIDNAYFELTELLSELTEYHLSQDIDCKQIEAILSRRDMSRTHKAEELAGVLHVDLKNKPYKELIRGLCGLKFNACVVFPDVQSEEVTKLDICLSESTFDEKSDEIANIIGEDYFEIIMAMKEMFDIGSLASIMKGHNYLSQARVASYTKHKEDLKLLKEVIKKYCGKKEYDKFFNSDADGSYASYVGSYNSKNKERRVGNKRTSEELYKEIKKLLKDAQKEDENVQKILTSIENETFLPKQLTASNGVIPNQVHAREMKKILSNAENYLPFLTEKDETGLSVSERILKLFTFQIPYYVGPTSENSGKNGGNGWVVRREDGQVLPWNIDEKIDMKATSEAFISRMVRRCTYISGEQVLPKASLEYQSYCVLNEINNIKIDGERISVELKQDIYKAVFQKGKKVTKKQLCKYLHTRGIIETEEQVTGVDVSINNALTTYGKFKPIFGEDISKDSVQKMIEDIVFWCTVYGDSKKFLKDRIEEKYGNKLSEEQIKRILGFKFKDWGNLSKKFLELNGADTSTGESISIIRALWNNNLNLMELINSSLYNYKECLAEYQNTMLKTLSEIEAEDLNEYYFSAPVRRMIWQTILVIKELVKVLGCEPERIFVEMTRRPDEHKTRTSSRRNKFEELYKKVKDEATDWMQVIAKAEEDGKIRSKKMYLYLTQKGRCMYTGKHIELDDLFDKNLYDIDHIYPRHFVKDDNIDNNLVLVCKEKNAHKSDHYPIEEEIFLSQKKMWLELRKSGFITEEKYNRLMGRSPFSDEQKAGFIARQLVETSQGTKGVANILRQLLPGSKIVYAKASNVSEFRHTRDDIPKSRLVNDFHHAHDAYLNIVVGNVYYVKFTQNPLNFIKKDYDKYKEDYNLSKMFDWDVKRNGEVAWIAQRKDGEAGTITTVKKMLSRNTPLMTRYSFEGKGGLANETLYSAKKAKGEGYIPFKSSDDKMQDVTKYGGFTKVTGAYFFLVEHTEKKKRIRTIESVPVSFVQKIEKNLGELKKYCEEILGLVDADIRLKKIKIGSLIKRNGYFCYITGKTGNRLSVRNAVNLCLKNEWIKYISKLEKVKEKDTIDEIITKEKNEVLYSELIQKFKHCIFSKRPNPVGDKLEKGSEKFSNLSIKDQCAVLCQVLRMAAILGSECDMTLLGESSICGEMKISKKIGDEEIYLINQSVTGLYEKKINLHTV

SEQ ID NO: 3197 - protein, 1293 aa, unidentified
  REGION 1..1293: note = Category: MG91 effectors
  REGION 1..1293: note = Description: MG91-389 effector
  source 1..1293: note = uncultivated organism sequence
MEKEYYLGLDMGTNSVGWAVTDDAYNLIRFKGKDMWGIREFDEANPAVERRTHRTSRRREQRNAVRMGLIRSYFADEIQKVDSNFYQRLDNSFFYVEDKQDNVKDKNGIFNDKNYKDANYYKQYPTIFHLRKELIEDASQKDVRLVYLAVANMFKHRGHFLLSGMGSESSKQTITDLYNQVSGLITEEYGISLKTDIAGTDFEQVLCSREYSRTRKSEKVCEILEIKNSDKLKKAFVKSMCGLSVKITDIIDDTFTEISDEDKKITFSFVDSDYDEKAGVLEEKLGTDVYDIISKLKEIHDKAQVAEIMKNYQYLSFARVADYEKHKKDLKILKRVVKKYFEPTVYDKLFRSEENGTYSAYVNSFNSEEKSRRNYKERKQEDLYNSIKKLLKSVDNVDDTDIEYIKNEMDKENFLPKQLTFKNGVIPNQIHASELKAILKNAEKYLPFLNEKDESGYTVSERILMLFSFQIPYYVGPVSSNSNGWVKRLEPGQVLPWNIDKKIDLKETSEQFIQRMVRNCTYIAGEKVLPKASLLYENFKVLNEINNLSINGERITVNLKQDLYNTLFLKGKRVTRKQIFNYFHSRGLVEEDSQISGIDIAVNNSLSTYGKFLPLFGEHLKEDKYKKMVDDIVFWCTVYGDSRKFLREQLEEKYSDVLDENQIKRITGMKFKDWGNLSKEFLELSGCCKSTGEVMPLIRAMWETNYNLMELLHSEEFTYSEELEEKQGKIEKVLSEYTIDDLNEEYFSAPVKRMVWQTLLIIKEIEKIMKCPPTRIFVEMTRKDDEKGDNGRKSSRKDQLLALYKKIQSEDKEWKKEMSSRIEDYDKNGALRSKKLYLYFIQKGLDMYTGKPIDLDNLMSANSNYDIDHIYPRHFVKDDNINNNLVLASKPANAEKSDIYPIKDSIYQKMKYTWKVLRDEGLITEEKYKRLTGRNPFTDEQKAGFIARQLVETGQGTKGVADLLTALLPDTKLVYSKAGNVSDFRKRYDIPKSRLINDFHHAHDAYLNIVVGNIYFTKFTSNPLNYIRKECSSKDNKYQYNLGNMYKWDVKRDGKTAWVAPEEGETGTLATVKKMLSRNTPILTRLTIEGHGGIADATLYSHKKAKQDTYIPLKSSDARMADVTKYGGYSSVTTAYLFLVEHEIKGKKIRTLETVPLYLKDRLENSKEKLEEYCRETLGYTNPSVRMKKIKLQSLIKLNGYYMQISGKTNKQFTVRNYVQFCLNSKWVDYIHKLEKYQDKGVIDDAITDEKNVELYNVLCEKHSVGIFTLRPNPVGDKIKKGYEKVLSVLYSH

SEQ ID NO: 3198 - protein, 1357 aa, unidentified
  REGION 1..1357: note = Category: MG91 effectors
  REGION 1..1357: note = Description: MG91-390 effector
  source 1..1357: note = uncultivated organism sequence
MQGYYLGLDMGTNSVGWAVTDYEYRLLRFKGKDMWGIREFDEAKPAVERRRHRTNRRRQQRKMVRLGLIKSYFADEISKIDPLFFNRLDNSKYFLEDKDEQVRCKNAIFNDINYTDKDYYAQYPTVFHLRKELIENKEPHDVRLVYLAISNMFKHRGNFLISGLGIDRDDETIGEAYLKVADMLSEEFDVEFDKKIDLSFFEKTLSSREYSRTKKSELICDILQVKNSEKQKKAFVKCLCGLNVKISDIIGENGIELSDEDKKTAFSFNDNDYDVKIIEIEQKIGENKTTVIAKLKEIHDKALLSEIMKGKPYLSYARVADYEKHAYDLKILKRVIKKYFSNQEYDNLFRSEENGTYSAYVNSYNSGNKSRRNYKERKQEDLYKNIKSLMKSLGDNDDIDVQYIKDEIDRENFLPKQLTFKNGVIPNQVHANELKAILNNAQEYLTFLNEKDESGYTVSERIQQLFSFQIPYYVGPVSSDSNGWVVRKEEGPVLPWNIKEKIDLKKTSEEFIGRMVRNCTYISGERVLPKASLLYEKYRVLNEINNLRIDGERISVELKQDIFNTLFLKGKRVTRKQIFNYLHSRGMAQEDAQISGIDVTVNNSLSTYGKFLPIFGEHLKEDSYKKMAENIVFWCTVYGDSKKFLKEQLEEKYADKLDEAQIKRILGMKFNDWGNLSKEFFELSGCNKSTGEVMPLINALWENNLNMIELLNSDEFTYKESLAEKQNVAIKSLSEYTIDDLNEEYFSAPVKRMIWQTLMIIKEIEKIMKASPDRVFIEMTRKDGEKGDKGRKNSRKDKLIALYKQIRSEDSAWKKEMSSRIEKYDENGSLRSKKLYLYFTQKGLDMYTGKPIDIDDLMSANSKYDIDHIYPRHFVKDDNINNNLVLASKTANSEKSDIYPIKDTIYQKMKSTWKLLKDENLITEEKYRRLVGREPFTDEQKAGFIARQLVETSQGTKGVADLLNMLLPDSKIVYSKADNVSEFRHKYEIPKSRLINDYHHANDAYLNIVVGNVYYTKFTQNPINFIKKEYSSGDRKFEYNLSKMFEWDVVRGDKVAWVAEKDRKHGTIVTVKKMINKNTPILTRMPVEGHGGLADATLYSHKKAKSDTYIPLKATDAKLQDVTKYGGFSSVATAYIFLVEHELKGKKVRTLETVPLYMKAELESSVERLEQYCRDTLGLINPSVRIKKIKLQSLIKLNGYYMQISGKTDKQFGMRNCVQLCLKKEWIEYVHKLEKFQSYGVIDDIISEQNNIKLYDELCEKHRNGIYNKKPNYMGDKLLNGKNEFVKLNKNEQIKVLIQIIKLTVVGLVEGDLTLIKESSKSGTLKISKNITNAKEFELINQSITGLYENRIDLLRV

SEQ ID NO: 3199 - protein, 1343 aa, unidentified
  REGION 1..1343: note = Category: MG91 effectors
  REGION 1..1343: note = Description: MG91-391 effector
  source 1..1343: note = uncultivated organism sequence
MEYYMGLDMGTSSVGWAVTDEKYNLIKKHGKDMWGIREFEEADTAEARRTFRVARRRRQREVVRIGLLKEYFHDEVIKVDPNFFQRLENSKYFQEDKDEEVNEKYGIFADKNYTDKDYFKKYPTIYHLRKELLHSQEPHDVRLIYLALLNMYKHRGHFLNASLGIDGENRKMKDIYCDFVLMARDVLELEFPTEFGEVQFQNLMCARDLSRKKKAEKLIDLLGIDKKQKQHIALLECILGLDKSVKTLYGKKLADDFDKSIKINFSDSGFDEKAEELADILGEERFDLILCMKELYDSATLNQIMGTHKYLSEARVQEYEKHKNDLKKLKCVIKKYGTREQYAFLFRSVEKATYSAYVRSVNSGGKERRNMSERTKDALYATLKKILKEFPADDKDCIYIMEEIEKNHFLPKQMTSANGVIPNQIHAKEMKQILKNAEKYLSFLSEKDESGLSVSERILQLFTFQIPYYIGPLSTNSAKNNGNGWVIRKEEGKVFPWNMDQKIDKKKTSEEFISRMVRRCTYMGGEQVLPKSSLEYECFSVLNELNNLKVRNEKLPVEIKQKIYTDLFTRGKKVSKKSIANYLKGCGILQEGAEDELTGMMDSINSSLSSYGKFRAIFGDQMKEDSCKKMIEKIIFWCTVYGNSKQFLKEQMEENYGSILTQNQIKRILGFKLKDWGNLSKEFLELQGSRKDTGEKMSLIRMLWETNDNLMELLDNSQYTYKKELEKRQENLEKTLKEIQPEDLEGYYFSAPVKRMIWQTLLVLKETEKVMGQPPKRLFVEMTREHGEKNDIKDSRAKKFLDLYKNIREEDHDWKNVIENAEESGTIRSKKMYLYLTQRGRCMYTGNIIDLSQLFDNNLYDIDHIYPRHFVKDDNLENNMVLVEKQKNAHKSDKYPLEESIYNKQISFWRELHHQKLINDEKFKRLTDRNPFSDEQKAGFIARQLVETSQGTKGITKILKEVLPDTTMVYAKAKNVSDFRNQYKILKSRVVNEFHHAHDAYLNIVVGNVYYTKFTNNPINFIKKQEPYNLSRVFEWNVVRNGEEAWIAKPEKEQKITIETVRKMLARNTPLLTRLSFEGTGGLANQTLYGAEKAQGDGYIPLKSSDLKLRNVRKYGGFSSVSTAYFILVEHEQKKKRVRTLETVPILWKDRIEKDPKQLEVYCTEVLGLINSDIRIRKIRIQSLVKKDGYYMYLSGKTGNQIIMRNAVQLCLRQEWINYIKKLEKETIDEVITKEENSELYNLLCEKHLEGIYAKRPNPVGEKLRKRICEFNQLEITEQRQLLLELLNLSKIGVVKANLTLIGETSSAGTMKVSKNISESKEFKLIHQSITGLYEKQVDLLNV

SEQ ID NO: 3200 - protein, 1347 aa, unidentified
  REGION 1..1347: note = Category: MG91 effectors
  REGION 1..1347: note = Description: MG91-392 effector
  source 1..1347: note = uncultivated organism sequence
MEEKEYYLGLDMGTNSVGWAVTDPQYIILRAKGKDMWGIREFESAETAETRRVHRTSRRRRQREVVRMGLVKDYFSDAINNVDGNFYARLENSKYHLEDKDETVRNKNGIFADEHYTDKEYYAEYPTIYHLIMELINNPAPHDVRLVYLAVANLFKRRGHFLNAGLSEDGGNQSMQTAYDEFNTTCNETLEFSFPGIDATQIEEVLKNRNYSKTVKSEKLAELLGVEKKEKQRIEILRAIAGRKVNAKVIFPNVETEDKVEFSFSDAAFDDNATELMTLLGDECYSLVLCMREMYDIGTLAEIMHGYQYLSESRMADYQKHHEDLVLLKSVIKSECTQKQYDELFRLDGEGSYSAYVNSILAKNHKQRRSMKGRTRDDFYKKVREFIGKSSNPDAIKICTEIENETFMPKMLTSANGIIPNQVHYKELKAILSNAEKYLPFLLEKDESGLTTSDRIQRLYKFRIPYYVGPVSNRDGKGNGWAVRKEEGMVLPWNLEEKIDLSKTKEAFIENLIRRCTYISDEKVLPKNSLIYEKFTVLNEINNIRINDERISVELKQDIYNDLFKKGKKVTRKTLAKYLINRGAIKAENQISGIDIAINNSLSSYGKFKAVFGESMDTDSTKKMVEDIIKTSTIYGDDKRELKNILRDKYGEILSEDQIKRIAGFRCKDWGRLSRAFLELAGTNCGTGEVTSIIQALWESQLNLMELLHSEDYTFGESLNEKLVKNEKSLSEITAEDLDDYYFSAPVKRMAWQTILLIKEISKIKGCEPSKIFIEMTRTDEEKGDKGRKNSRAKELTALYKNIKKEGKAWIELISKEDASGRLKSKKMYLYIKQMGRDMYTGEQIDLDRLFDDNLYDIDHIYPRHFVKDNNIENNLVLVNKAKNSRKSDNYPLDSDIVRNPKVRELWEMLHTNHLMSDEKYHRLTSRKAFTDEDMAGFIARQLVETGQATKGVADLLKDLTNSEIIYSKAGNVSDFRHTYDIPKSRIVNEFHHAHDAYLNIVVGNAYYTKFTSNPLNYIRKEYKKNTKENNYHLNKIFASTISRNGYVAWFAGSDKNPGTIQTVKKMLSRNTPLMTRMTFVVHGSIAEETLYGKNTAKEDSYLPLKGSDPRMSVEKYGGFKKASGAYFFLVEHELKGKKVRTIETVPVYLMKKLSDKRELQKYCEEKLGLINPSIRLKQIKMQSLIKLNGYFVNVTGRTNKQLTLRNAVNLKLDKEDIYIIHLVEKCIGEERDDRLSEESILSLYQTLTEKQVSGIYRNRPNSVYEKLNEGMIRFKKLERKQQIKVLANMLNLTMVGKAQADLKDIGGSANSGVMLMAKKINNYNEVKLINQSVTGLYQTEVDLLTV

SEQ ID NO: 3201 - protein, 1352 aa, unidentified
  REGION 1..1352: note = Category: MG91 effectors
  REGION 1..1352: note = Description: MG91-393 effector
  source 1..1352: note = uncultivated organism sequence
MTAFKYYLGLDMGTNSVGWAATDPEYRLLKAKGKDLWGIREFNEASGAVERRTHRISRRRRQREQVRIGILKDYFHDAICEVDPSFFRRLENSKYHEEDKDVEVRYKNNIFNDGNYTDKDYFNEYPTIYHLRNELISSTEKHDVRLVFLALLNMFKHRGHFLNAGLGENNGESNIDNAYFELTELLSELTEYHLSQDIDCKQIEAILSRRDMSRTHKAEELAGVLHVDLKNKPYKELIRGLCGLKFNACVVFPDVQSEEVTKLDICLSESSFDEKSDEIANIIGEDYFEIIMAMKEMFDIGSLASIMKGHNYLSQARVASYTKHKEDLKLLKEVIKKYCGKKEYDKFFNSDADGSYASYVGSYNSKNKERRVGNKRTSEELYKEIKKLLKDAPKEDENVQKILTSIENETFLPKQLTASNGVIPNQVHAREMKKILSNAENYLPFLTEKDETGLSVSERILKLFTFQIPYYVGPTSENSGKNGGNGWVVRREDGQVLPWNIDEKIDMKATSEAFISRMVRRCTYISGEQVLPKASLEYQSYCVLNEINNIKIDGERISVELKQDIYKAVFQKGKKVTKKQLCKYLHTRGIIETEEQVTGVDVSINNALTTYGKFKPIFGEDISKDSVQKMIEDIVFWCTVYGDSKKFLKDRIEEKYGNKLSEEQIKRILGFKFKDWGNLSKKFLELNGADTSTGESISIIRALWNNNLNLMELINSSLYNYKECLAEYQNTMLKTLSEIEAEDLNEYYFSAPVRRIIWQTILVIKELVKVLGCEPERIFVEMTRKPDEHKTRTSSRRNKFEELYKKVKDEATDWMQVIAKAEEDGKIRSKKMYLYLTQKGRCMYTGKHIELDDLFDKNLYDIDHIYPRHFVKDDNIDNNLVLVCKEKNAHKSDHYPIEEEIFLSQKKMWLELRKSEFITEEKYNRLMGRSPFSDEQKAGFIARQLVETSQGTKGVANILRQLLPGSKIVYAKASNVSEFRHTRDDIPKSRLVNDFHHAHDAYLNIVVGNVYYVKFTQNPLNFIKKDYDKYKEDYNLSKMFDWDVKRNGEVAWIAQRKDGEAGTITTVKRMLSRNTPLMTRYSFEGKGGLANETLCSAKKAKGEGYIPFKSSDDKMQDVTKYGGFTKVTGAYFFLVEHTEKKKRIRTIESVPVYLAQKIEQNPDELKKYCEEILGLVDADIRLKKIKIGSLIKRNGYFCYITGKTGNRLSVRNAVNLCLKNEWIKYISKLEKVKEKDAVDEIITKEKNEVLYSELIQKFKHGIFSKRPNPVEDKLEKGSEKFSNLSIKEQCAVLCQILQLAAVLGSECDMTLLGESAHCGKMLISKKIGDEEIYLLNQSVTGLYEKKINLHTV

SEQ ID NO: 3202 - protein, 1358 aa, unidentified
  REGION 1..1358: note = Category: MG91 effectors
  REGION 1..1358: note = Description: MG91-394 effector
  source 1..1358: note = uncultivated organism sequence
MEKEYYLGLDMGTNSVGWAVTDDAYNLIRFKGKDMWGIREFDEANPAVERRTHRTSRRREQRNAVRMGLIRSYFADEIQKVDSNFYQRLDNSFFHVEDKQDNVKDKNGIFNDKNYKDADYYKQYPTIFHLRKELIEDASQKDVRLVYLAVANMFKHRGHFLLSGIGSESSKQTITDLYNQVSGLITEEYGISLKTDIAGTDFEQVLCSREYSRTRKSEKVCEILEIKNSDKLKKAFVKSMCGLSVKITDVIDDTFTEISDEDKKITFSFVDSDYDEKAGVLEEKLGTDVYDIISKLKEIHDKAQVAEIMKNYQYLSFARVADYEKHKKDLKILKRVVKKYFEPTVYDKLFRSGENGTYSAYVNSFNSGEKSRRNYKERKQEDLYNSIKKLIKSIDNVCDTDIEYIKNEIEKENFLPKQLTFKNGVIPNQIHASELKAILKNAEKYLPFLNEKDESGYTVSERILMLFSFQIPYYVGPVSSNSNGWVKRLEPGQVLPWNIDKKIDLKETSEQFIQRMVRNCTYIAGEKVLPKASLLYENFKVLNEINNLSINGERIAVALKQDLYNTLFLKGKRVTRKQIFNYFHSRGLVEEDSQISGIDIAVNNSLSTYGKFLPLFGEHLKEDKYKKMVDDIVFWCTVYGDSRKFLREQLEEKYSDVLDENQIKRITGMKFKDWGNLSKEFLELSGCCKSTGEMIPLIRAMWETNYNLMELLHSEEFTYSEELEEKQGKIEKVLSEYTIDDLNEEYFSAPVKRMVWQTLLIIKEIEKIMKCPPTRIFVEMTRKDDEKGDNGRKSSRKDQLLALYKKIQSEDKEWKKEMSSRIEDYDKNGALRSKKLYLYFIQKGLDMYTGKPIDLDNLMSANSNYDIDHIYPRHFVKDDNINNNLVLASKPANAEKSDIYPIKDSIYQKMKYTWKVLRDEGLITEEKYKRLTGRNPFTDEQKAGFIARQLVETGQGTKGVADLLTALLPDTKLVYSKAGNVSDFRKRYDIPKSRLINDFHHAHDAYLNIVVGNIYFTKFTSNPLNYIRKECSSKDNKYQYNLGNMYKWDVKRDGKTAWIAAKEGETGTIATVKKILSRNTPTLTRLTIEGHGGIADATLYSHKKAKQDAYIPLKSSDARMADVTKYGGYSSVTTAYLFLVEHEIKGKKIRTLETVPLYLKDRLENSKEKLEEYCRESLGYTNPSVRMKKIKLQSLIKLNGYYMQISGKSIKQFEVRNYVQICLNGKWVDYIHKLEKYQDKGVIDNAITDEKNVELYNILCEKHSVGIFTLRPNPVGDKIKKGYDKFVNLTTEEQIKLLIEIIKLTCVGIVKADLRLIGASEKSGTMKINKNITDAKECFLINQSVTGLYENRIDLLRV

SEQ ID NO: 3203 - protein, 1215 aa, unidentified
  REGION 1..1215: note = Category: MG91 effectors
  REGION 1..1215: note = Description: MG91-395 effector
  source 1..1215: note = uncultivated organism sequence
MYNRYYLGLDMGTSTVGWAVTDPDYKLIRKSGKDMWGIREFEEGKTAAERRVNRIARRRRQRETARIGLLKEYFHDAIVAVDPLFYQRLDNSRYWPEDKDAVLSSKNSLFHDKDYTDADYYREYPTIFHLRMELIKNPKPHDVRLVYLALLNMFKHRGHFLLNGNLSEDSGSDMGTLCRACLERFEEIDISLVGVSGDEIENVLSLRDLSRSGKAEKLMDLLNISNKQKKEVLWVKAICGLKVDVTKLFNSINTEEKLDLCFADAGFEEKVPEITEAIGEENAQILFLMKAIFDRGILARLLKGSNYLSEARIKDYEKHKSDLSLLKHLVRKYCTEDVYDKMFRAPEAGSYSAYVNSTLTGDEKKRRNMGGRSREDFYKTVKNCFKDIKTPDDDLQRVLRDIDNEDFMPKQLTASNGVIPNQLHQKEMERILDNARKYLPFLNQKDERGLCVYERILRLFTFQIPYYIGPVTENSSKNGGTGWVVRKEKGQVLPWNFQDKIDIPATSEQFIQRMVRNCTYMSGEKVLPKSSLLYESYCVLNEINNIRINGEKITVELKQDLYNDLFKKGRKVTKKQLVKYLINQGVMKEEAELSGIDVTVNNSLGSYGKFAAVFGPEIETDSGKTMIENIIYWGTVFGQDKNLWKQKIQQNYPEITRTVLKRILGYRFSDWGRMSRTFLEMEGCDKNTGEIRSLIRSMWETNHNLMELLDRNLFTYREDLEKQQKKQFSSLSEITPEVLDDYYFSAPVKKMIWQTFGVIREVEKVMGCPPEKIFVEMTRTDEEKGDKGRKDSRKKVLLEKFRGIKEASRDWRDFIEKEDQSGRLRSKKMFLYISQLGKDMYSGEAIDLDRLFDDNLYDIDHIYPRHFVKDDSIHNNLVLVKKQTNAHKSDTYPLENSIRSNPAVTSLWHLLREKGLITEEKYRRLTGRNPFSEEQQADFIARQMVETGQATKGVSELLKEAVPEASIVYSKAGNVSDFRRTYDLLKSRSVNDFHHAHDAYLNIVVGNAYYVKFTQNPLNYIRKEYRNGTKNGEYNLSKMFERNIVRNGETAWIASEKKDPGTIATVKAMLKRNTPILTRQSFIAHGALTDATVYGKDIAKAKVYLPTKTSDQRLQDVTKYGGLNKAAVAYFSLVEHTVKGKKVRTLEAIPVYLKEKVEMHPEELNIYLTDYLGLKDVSVRMRVVRIQSLIKVDGYYAYISGNNDNRIMLRYAIKL

SEQ ID NO: 3204 - protein, 1358 aa, unidentified
  REGION 1..1358: note = Category: MG91 effectors
  REGION 1..1358: note = Description: MG91-396 effector
  source 1..1358: note = uncultivated organism sequence
MEKEYYLGLDMGTNSVGWAVTDDAYNLIRFKGKDMWGIREFDEANPAVERRTHRTSRRREQRNAVRMGLIRSYFADEIQKVDSNFYQRLDNSFFHVEDKQDNVKDKNGIFNDKNYKDADYYKQYPTIFHLRKELIEDASQKDVRLVYLAVANMFKHRGHFLLSGIGSESSKQTITDLYNQVSGLITEEYGISLKTDIAGTDFEQVLCSREYSRTRKSEKVCEILEIKNSDKLKKAFVKSMCGLSVKITDVIDDTFTEISDEDKKITFSFVDSDYDEKAGVLEEKLGTDVYDIISKLKEIHDKAQVAEIMKNYQYLSFARVADYEKHKKDLKILKRVVKKYFEPTVYDKLFRSGENGTYSAYVNSFNSGEKSRRNYKERKQEDLYNSIKKLIKSIDNVCDTDIEYIKNEIEKENFLPKQLTFKNGVIPNQIHASELKAILKNAEKYLPFLNEKDESGYTVSERILMLFSFQIPYYVGPVSPNSNGWVKRLEPGQVLPWNIDKKIDLKETSEQFIQRMVRNCTYIAGEKVLPKASLLYENFKVLNEINNLSINGERIAVALKQDLYNTLFLKGKRVTRKQIFNYFHSRGLVEEDSQISGIDIAVNNSLSTYGKFLPLFGEHLKEDKYKKMVDDIVFWCTVYGDSRKFLREQLEEKYSDVLDENQIKRITGMKFKDWGNLSKEFLELSGCCKSTGEMIPLIRAMWETNYNLMELLHSEEFTYSEELEEKQGKIEKVLSEYTIDDLNEEYFSAPVKRMVWQTLLIIKEIEKIMKCPPTRIFVEMTRKDDEKGDNGRKSSRKDQLLALYKKIQSEDKEWKKEMSSRIEDYDKNGALRSKKLYLYFIQKGLDMYTGKPIDLDNLMSANSNYDIDHIYPRHFVKDDNINNNLVLASKPANAEKSDIYPIKDSIYQKMKYTWKVLRDEGLITEEKYKRLTGRNPFTDEQKAGFIARQLVETGQGTKGVADLLTALLPDTKLVYSKAGNVSDFRKRYDIPKSRLINDFHHAHDAYLNIVVGNIYFTKFTSNPLNYIRKECSSKDNKYQYNLGNMYKWDVKRDGKTAWIAAKEGETGTIATVKKILSRNTPTLTRLTIEGHGGIADATLYSHKKAKQDAYIPLKSSDARMADVTKYGGYSSVTTAYLFLVEHEIKGKKIRTLETVPLYLKDRLENSKEKLEEYCRETLGYTNPSVRMKKIKLQSLIKLNGYYMQISGKTNKQFTVRNYVQFCLNSKWVDYIHKLEKYQDKGVIDDAITDEKNVELYNVLCEKHSVGIFTLRPNPVGDKIKKGYDKFVNLTTEEQIKLLIEIIKLTCVGIVSANLTLIGGAAISGKMLISKNITDAKECLLINQSVTGLYENRIDLLRV

SEQ ID NO: 3205 - protein, 1107 aa, unidentified
  REGION 1..1107: note = Category: MG91 effectors
  REGION 1..1107: note = Description: MG91-397 effector
  source 1..1107: note = uncultivated organism sequence
MNILSLDLGITSIGYSILEKKENNRYSLIDYGVSMFDAPFDKDGKSKKLLHSTNTSMSNLYAKRKQRKKALANLFEKFGLAKAQKLLQQEKQNIYKNKWQLRCKDVFERKLNIGEFFTILYFIAKHRGYKSLDTNELLEELCEELKLDCGLKSSQKDDEKGKIKQALKRVEELKQNTNKTVAQIIYEIESKKQTPTFRNHDNYNYMIRREYIEDELKKLVESQVKFGLFGNTFDKEKFINELKEIIVKQKESSNDLNLFANCEYYKEHKVANQYSVVADIFKMYESVINIKLNKEKITKEQIQLIADDFFTKIKKGKNIPDIKYKDIRKILKLSDDIKIFDKKDSYVRKGKTIHHTITKFHFLNNLSKFDNSFIVENLKNLENLAEIFEVLNKEKSPKTIFEQLKGKVDEKTIIELIKYKNGKSLNISHYAMLKFIPYFQEGLTTDEIKKKLDLNRNEDYSKYKKGIKYLHVNQFEKDDNLEINNHPVKYIVSAVMRVVKHLHTLYGPFDEIKVESTRELSLPKKVKDKIDKVNKDNEAKYLAVLKNEAYLSAAKYHNKNIQKYKEQLVLYEEQEGRDIYTWQGIEIDDIFKDKLEVDHIVPQSLGGLSVKHNKVLCFKNSNATKGNRLPMNYIKDTESFRKNIEYLYTKKVINGKKLKNLLATNLDEIYKDTFESKSLRATSYVEALTAQMLKRYYPFADKQKQKDGNAVMYIQGRATANIRKLLHVKAKTRGTNIHHAIDALIIGVTSHSWLKKISNTFRENYGVIDDKARENIKKELPLIEGVSVAELVAHIEENYNFDGEESVFYRDIFGNVKVVPFWVSKKSMVSKIHKDTIYAKKPDGIFTVREKILDKFIALKITPTTSPDEFMKKFQKEILEKMYLYKTNPKDKICQIIQQRAFDIAQLLDNLQLEDTTDKEMLSETKKYLDEFIHQDLKDHNSNVIRKVQFYQTNLTGFEIRGGLATKEKTFIGFSATLNGDKIEYKRIDVANFETIKKDAGFKVYKNDIVFFIYPDGSFKGGKIVSFLEEKNVASFSNLRYPANINLQPHSFVTLFKGKANSHKQHSINKAIGIIKLHLDIIGNIKSFSSLGEVDSELLSFLKKLKD

SEQ ID NO: 3206 - protein, 1358 aa, unidentified
  REGION 1..1358: note = Category: MG91 effectors
  REGION 1..1358: note = Description: MG91-398 effector
  source 1..1358: note = uncultivated organism sequence
MEKEYYLGLDMGTNSVGWAVTDDAYNLIRFKGKDMWGIREFDEANPAVERRTHRTSRRREQRNAVRMGLIRSYFADEIQKVDSNFYQRLDNSFFHVEDKQDNVKDKNGIFNDKNYKDADYYKQYPTIFHLRKELIEDASQKDVRLVYLAVANMFKHRGHFLLSGIGSESSKQTITDLYNQVSGLITEEYGISLKTDIAGTDFEQVLCSREYSRTRKSEKVCEILEIKNSDKLKKAFVKSMCGLSVKITDIIDDTFTEISDEDKKITFSFVDSDYDEKAGVLEEKLGTDVYDIISKLKEIHDKAQVAEIMKNYQYLSFARVADYEKHKKDLKILKRVVKKYFEPTVYDKLFRSEENGTYSAYVNSFNSEEKSRRNYKERKQEDLYNSIKKLLKSVDNVDDTDIEYIKNEMDKENFLPKQLTFKNGVIPNQIHASELKAILKNAEKYLPFLNEKDESGYTVSERISMLFSFQIPYYVGPVSSNSNGWVKRLEPGQVLPWNIDKKIDLKETSEQFIQRMVRNCTYIAGEKVLPKASLLYENFKVLNEINNLSINGERITVNLKQDLYNTLFLKGKRVTRKQIFNYFHSRGLVEEDSQISGIDIAVNNSLSTYGKFLPLFGEHLKEDKYKKMVDDIVFWCTVYGDSRKFLREQLEEKYSDVLDENQIKRITGMKFKDWGNLSKEFLELSGCCKSTGEMIPLIRAMWETNYNLMELLHSEEFTYSEELEEKQGKIEKVLSEYTIDDLNEEYFSAPVKRMVWQTLLIIKEIEKIMKCHPTRIFIEMTRKDDEKGDNGRKSSRKDQLLALYKKIQSEDKEWKKEMSSRIEDYDKNGALRSKKLYLYFIQKGLDMYTGKPIDLDNLMSANSNYDIDHIYPRHFVKDDNINNNLVLASKPANAEKSDIYPIKDSIYQKMKYTWKVLRDEGLITEEKYKRLTGRNPFTDEQKAGFIARQLVETGQGTKGVADLLTALLPDTKLVYSKAGNVSDFRKRYDIPKSRLINDFHHAHDAYLNIVVGNIYFTKFTSNPLNYIRKECSSKDNKYQYNLGNMYKWDVKRDGKTAWIAAKEGETGTIATVKKMLSRNTPTLTRLTIEGHGGIADATLYSHKKAKQDAYIPLKSSDARMADVTKYGGYSSVTTAYLFLVEHEIKGKKIRTLETVPLYLKDRLENSKEKLEEYCRETLGYTNPSVRMKKIKLQSLIKLNGYYMQISGKTNKQFTVRNYVQFCLNSKWVDYIHKLEKYQDKGVIDDAITDEKNVELYNVLCEKHSVGIFTLRPNPVGDKIKNGYDKFVNLTTEEQIKLLIEIIKLTCVGIVSANLTLIGGASISGKMLISKNITDAKECLLINQSVTGLYENRIDLLRV

SEQ ID NO: 3207 - protein, 1358 aa, unidentified
  REGION 1..1358: note = Category: MG91 effectors
  REGION 1..1358: note = Description: MG91-399 effector
  source 1..1358: note = uncultivated organism sequence
MEKEYYLGLDMGTNSVGWAVTDDAYNLIRFKGKDMWGIREFDEANPAVERRTHRTSRRREQRNAVRMGLIRSYFADEIQKVDSNFYQRLDNSFFHVEDKQDNVKDKNGIFNDKNYKDADYYKQYPTIFHLRKELIEDASQKDVRLVYLAVANMFKHRGHFLLSGIGSESSKQTITDLYNQVSGLITEEYGISLKTDIAGTDFEQVLCSREYSRTRKSEKVCEILEIKNSDKLKKAFVKSMCGLSVKITDVIDDTFTEISDEDKKITFSFVDSDYDEKAGVLEEKLGTDVYDIISKLKEIHDKAQVAEIMKNYQYLSFARVADYEKHKKDLKILKRVVKKYFEPTVYDKLFRSGENGTYSAYVNSFNSGEKSRRNYKERKQEDLYNSIKKLLKSIDNVCDTDIEYIKNEIEKENFLPKQLTFKNGVIPNQIHASELKAILKNAEKYLPFLNEKDESGYTVSERILMLFSFQIPYYVGPVSSNSNGWVKRLEPGQVLPWNIDKKIDLKETSEQFIQRMVRNCTYIAGEKVLPKASLLYENFKVLNEINNLSINGERIAVALKQDLYNTLFLKGKRVTRKQIFNYFHSRGLVEEDSQISGIDIAVNNSLSTYGKFLPLFGEHLKEDKYKKMVDDIVFWCTVYGDSRKFLREQLEEKYSDVLDENQIKRITGMKFKDWGNLSKEFLELLGCCKSTGEMIPLIRAMWETNYNLMELLHSEEFTYSEELEEKQGKIEKVLSEYTIDDLNEEYFSAPVKRMVWQTLLIIKEIEKIMKCPPTRIFVEMTRKDDEKGDNGRKSSRKDQLLALYKKIQSEDKEWKKEMSSRIEDYDKNGALRSKKLYLYFIQKGLDMYTGKPIDLDNLMSANSNYDIDHIYPRHFVKDDNINNNLVLASKTANAEKSDIYPIKDSIYQKMKYTWKVLRDEGLITEEKYKRLTGRNPFTDEQKAGFIARQLVETGQGTKGVADLLTALLPDTKLVYSKAGNVSDFRKRYDIPKSRLINDFHHAHDAYLNIVVGNIYFTKFTSNPLNYIRKECSSKDNKYQYNLGNMYKWDVKRDGKTAWIAAKEGETGTIATVKKMLSRNTPTLTRLTIEGHGGIADATLYSHKKAKQDAYIPLKSSDARMADVTKYGGYSSVTTAYLFLVEHEIKGKKIRTLETVPLYLKDRLENSKEKLEEYCRETLGYTNPSVRMKKIKLQSLIKLNGYYMQISGKTNKQFTVRNYVQFCLNSKWVDYIHKLEKYQDKGVIDDAITDEKNVELYNVLCEKHSVGIFTLRPNPVGDKIKKGYDKFVNLTTEEQIKLLIEIIKLTCVGIVSANLTLIGGASISGKMLISKNITDAKECLLINQSVTGLYENRIDLLRV

SEQ ID NO: 3208 - protein, 603 aa, unidentified
  REGION 1..603: note = Category: MG91 effectors
  REGION 1..603: note = Description: MG91-400 effector
  source 1..603: note = uncultivated organism sequence
MAKENFVLTLPLRVDKCQADILDKRYELLRLIYNMVQQKLVRQYIYFSQQKAFKACESFEQKREFFNTHPFHFKGIKGKNGELCDIKFPYTYESRSSSSGKRPSGGISDYVSKLWSHKVGADKRLVDFGLNGSIMEELGLHVMKAWEDRLYKYKTKRVSFKGYGAINSLGCRYHKGNFAGFTINLEEGFITFNTNGRHGQFADIITLPIDFSREKKGYAAEAFKSGVDSLRKLIIVRRCIRGRNKYYLQLTISGEKPQKGRTLGKGNVGIDIGPSTIATSSLQGVHFDKLADKCDNIEHELYLINRKLDRSRRVNNPENYNPDGTIKRGVRLVWKKDKDVRRYASLKQQRKELYRKQAETRKQQHLEMANAILSQGDTFIVENNPIDAWVRRAKETKKNKTGKIRCKKRYGKSVANHAPAMFVSILKNKVQSLGGMFREVDPGYAATQFDFTNGVFTKHEVSERSITLSNGRTHQRDMLSAFNLQHIGQELKEYDIEQMQADYSIFCRLEAAEQERFKETRRNERDALYFVGAFAKKLRHEPQEETVANRHNGGVGRKHCNTLCTENAKITGSGLVRESIERVSEAPEECHHIGNQPIILDGL

SEQ ID NO: 3209 - protein, 1347 aa, unidentified
  REGION 1..1347: note = Category: MG91 effectors
  REGION 1..1347: note = Description: MG91-401 effector
  source 1..1347: note = uncultivated organism sequence
MEEKEYYLGLDMGTNSVGWAVTDPQYTILRAKGKDMWGIREFESAETAEKRRGHRTSRRRRQREVVRMGLVKDYFSDAINNVDGNFYARLENSKYHLEDKDEAVRNKNGIFADEHYTDKEYYAEYPTIYHLIMELINNPAPHDVRLVYLAVANLFKRRGHFLNAGLSEDGGNQSMQTAYDGFNTTCNETLGFSFPGINATQIEEVLKNRNYSKTVKSEKLAELLGVEKKEKQRIEILRAIAGRKVNAKVIFPNVETEDKVEFSFSDAAFDDNATELMTLLGDECYSLVLCMREMYDIGTLAEIMHGCQYLSESRMADYQKHHEDLVLLKSVIKSECTQKQYDELFRLDGEGSYSAYVNSTLAKNHKQRRSMKGRTRDDFYKKVRGLIGKSSNPDAIKICTEIENETFMPKMLTSANGIIPNQVHYKELKAILSNAEKYLSFLLEKDESGLTTSDRIQRLYKFRIPYYVGPVSNRDGKGNGWAVRKEEGTVLPWNLEEKIDLSKTKEAFIENLIRRCTYISDEKVLPKNSLIYEKFTVLNEINNIRINDERISVDLKQDIYNELFKKGKKVTRKTLAKYLINRGVIEAENQISGIDIAINNSLSSYGKFKAVFGESMDTDTTKKMVEDIIKTSTIYGDDKRELKNILRDKYGEILSEDQIKRIAGFRFKDWGRLSRAFLELAGADCRTGEVTSIIQALWESQLNLMELLHSEDYTFGESLNEKLVKNEKSLSEITAEDLDDYYFSAPVKRMAWQTILLIKEISKIKGCEPSKIFIEMTRTDEEKGDKGRKNSRAKELTALYKNIKKEGKAWIELIGKEDASGRLKSKKMYLYIKQMGRDMYTGEQIDLDRLFDDNLYDIDHIYPRHFVKDNNIENNLVLVNKAKNSRKSDNYPLDSDIVRNPKVRELWEMLHTNHLMSDEKYHRLTSRKAFTDEDMAGFIARQLVETGQATKGVADLLKELTSSEIIYSKAGNVSDFRHAYDIPKSRIVNEFHHAHDAYLNIVVGNAYYTKFTSNPLNYIRNEYKKNTKENNYHLNKIFESTISRNGYVAWLAGSDKNPGTIQTVKKMLSRNTPLMTRMTFVIHGSIAKETLCGKNIAKEDSYLPLKGSDPRMSVEKYGGFNKASGAYFFLVEHELKGKKVRTIETVPVYLMKKLSDERELQKYCEEKLGLINPSIRLKQIKMQSLIKLNGYFVNVTGRTNKQLTLRNAVNLKLDKEDIYIIHLVEKCIGEERDDRLSEESILSLYQTLTEKQASGIYRNRPNSVYEKLNEGMIRFKNLERKQQIKVLANILNLTMVGKAQADLKDIGGSANSGVMLMAKKINNYNEVKLINQSVTGLYQTEVDLLTV

SEQ ID NO: 3210 - protein, 1115 aa, unidentified
  REGION 1..1115: note = Category: MG91 effectors
  REGION 1..1115: note = Description: MG91-402 effector
  source 1..1115: note = uncultivated organism sequence
MRAICGLKINAYTLFSDQLPDDTTKIDLCVSDASFDEKSEELVSLIGEDLFQIILNIKEIYDIGSLAGILKGYTYLSQARVAAYDKHKHDLKLLKSSIKKYCTKEEYNNFFNSDADGSYASYIGSFNSGNKERRVGSKRTSEDLYKEIKKLLKGANKSDPAINEIFTSIETESFLPKQLTASNGIIPNQVHSKEMARILTNAENYLPFLKETDENNLSISNRILQLYKFQIPYYIGPVTEKSQRDGGNGWVIRKDNGRVFPWNIEEKIDVKATSEAFISRMVRRCTYMNGKQVLPKASLEYESFRVLNEINNLRIDGERIPVTLKQDIYTDLFQKGKKVTKKQLCNYLATRGLIESSEQVTGIDIAINNSLSTYGKFKAIFGEDIKLDHIQHMIEDIVFWCTVYGDSKQFLKEQIEDKYKGKLSPEQMKRILGFKFKDWGNLSKEFFELKGADKSTGEAVSIIRALWENNLNLMELINSPEFDFKEQLADYEANSLKTLSDFEPEDLNDYYFSAPVRRMIWQTTLIIKELVHVLGKEPARIFIEMTREKDASRGRTLSRKKKFEDLYKNVKDENTDWAKVIEHADESGTIRSKKMYLYLTQKGRCMYTGNHIELSDLFNDNLYDIDHIYPRHFVKDDNIDNNLVLVTKEKNAHKSDNYPLEAEIFNKQRNMWTQLRKEGFISEEKYNRLMGRNAFTDEQKAGFIARQLVETSQGTKGVAELFHQLLPNSKIVYAKAGNVSDFRRNREFPKSRLVNDFHHAHDAYLNIVVGNVYYVKFTQNPINYIKNSYNKDMNKNNYNLSRMFDWDVKRGDEVAWIAQKQDGAAGTISTVKKMLSKNTPLMTRLSYEGKGALANETLYSAEKAKGEGYIPFKSSDTKIQDVTKYGGFTSVTGAYFFLVEHDEKKKRIRTIESVPLYLADKIDKDSSELERYCDKLGLVNYDVRVRKIKIGSLIKYNGYFCYITGKTGYRLIVRNATNLCLASNWRKYIKKIEKYKETTIIDNVITAEENIKLYNELLNKFTVGIFGRRPNPIGEKMDSARDKFASLSIENQCLALYQILQLTAILGNESDLQLIGASTHAGKMLISKKIGTDEIYLINQSPTGLFETKIDLQTI

SEQ ID NO: 3211 - protein, 1356 aa, unidentified
  REGION 1..1356: note = Category: MG91 effectors
  REGION 1..1356: note = Description: MG91-403 effector
  source 1..1356: note = uncultivated organism sequence
MGRDYYLGLDMGTSSVGWAVTDEKYNLLRAKGKDLWGIREFEEAEGGIARRQNRISRRRRQREQVRIGLLKSYFAEEIEKVDPDFLQRLENSKYHLSDKDEKVRYKSAIFNDPEYTDKDYYRDYPTIFHLRAELIHNQEPHDIRLVYLALLNMFKHRGHFLNASLSAEEETQSMSDAYTAFRALVEEVMTANETENLFFPDGKADEIEAIISSRDYNRKRKSELMTEMLGFTKKDKAAQALIKGMCGLTVDVKTVFREIESEAKLSISFSDSNYDEKIVEIQEVLDDEQLELLEAVKTIYDIGSLAGVLKGEKYLSDARITDYNKHKEDLALLKKIIRKYTDQKTYNDLFRGTEPGSYSAYVNSTNSGKKQRRNMGGNAKRNQEAFYASLKKLLNKLPSEDDDVQKILADIDKELFLPKQLTFANGVIPNQVHAREMKAILNNAEQYLPFLTEKDESGLTVSERILKLFSFQIPYYVGPVTTKSSRDGGNGWVVRKESGQVLPWNIEDKIDMDATSKKFIENLIRECTYIAGEKVLPKGSLLYERYCVLNEINNIKIDGRPIDVELKQKIFEDKFMSGKKVTRKQLVTYLHGKGVLEDDAQLTGIDKTINNSLSSYGKFLGVFGDELKKDSCQIMVEDIIRDCTIYGDSKKRLRETLQKKYVDNNNLSESQLKRILGFKFKDWGRMSKEFLEMQGINRETGEVMSLVQAMWETNLNLMELIYSEDFTFAEALQEKQAKDYLTLSEFKFEDLDEYYFSAPVKRMVWQTLLIIKELEKVLGAPPKKVFIEMTRSDGVKGDRGRTISRKKQFEDLYKKIKDESQDWASIIDNADASGKLRSKKMYLYLTQMGKCMYTGKPIDLDDLFDDNKYDIDHIYPRHYVKDDNLGNNLVLVEKKANASKGDRYPLDTDIRGKMHGTWKFLKEKGLITEEKYRRLTGSNPFSEEQQADFIARQLVQTSQGTKGVADLLKQLLPDAKIAYSKASNVSDFRRDYDLPKSRLINDFHHANDAYLNIVVGNAYLVKFTQNPLNYIRSGDVQYNLGRMFEKDIVRNGEVAWLADDGKGNHGTIVTVKKVMARNTPMMTRMVLNGHGAIANATLYPASKASADNYIPLKGSDSKIADVTKYGGFTSVSTSRFVLVEHLVKKERIRTLEALPILVANSCKTMEDIENYCEEELGLIAPKVKLDGIKIQSLLKINGFYVHLSGKTNKQLALRNAVNLCLDAKWKEYIHYLEKASNNGNYGNPICSDMNIELYSILAEKHSSSIFAKRPNPVGTKLVKEKETFSKLELVDQVSVLLQILQLSAIGITQADLRAIGGAGIAGKMLISKDISKQEEALLIMQSPTGLYESTIDLKTI

SEQ ID NO: 3212 - protein, 1356 aa, unidentified
  REGION 1..1356: note = Category: MG91 effectors
  REGION 1..1356: note = Description: MG91-404 effector
  source 1..1356: note = uncultivated organism sequence
MGRDYYLGLDMGTSSVGWAVTDEKYNLLRAKGKDLWGIREFEEAEGGIARRQNRISRRRRQREQVRIGLLKSYFAEEIEKVDPDFLQRLENSKYHLSDKDEKVRYKSAIFNDPEYTDKDYYRDYPTIFHLRAELIHNQEPHDIRLVYLALLNMFKHRGHFLNASLSAEEETQSMSDAYTAFRALVEEVMTANETENLFFPDGKADEIEAIISSRDYNRKRKSELMTEMLGFTKKDKAAQALIKGMCGLTVDVKTVFREIESEAKLSISFSDSNYDEKIVEIQEVLDDEQLELLEAVKTIYDIGSLAGVLKGEKYLSDARITDYNKHKEDLALLKKIIRKYTDQKTYNDLFRGTEPGSYSAYVNSTNSGKKQRRNMGGNAKRNQEAFYASLKKLLNKLPSEDDDVQKILADIDKELFLPKQLTFANGVIPNQVHAREMKAILNNAEQYLPFLTEKDESGLTVSERILKLFSFQIPYYVGPVTTKSSRDGGNGWVVRKESGQVLPWNIEDKIDMDATSKKFIENLIRECTYIAGEKVLPKGSLLYERYCVLNEINNIKIDGRPIDVELKQKIFEDKFMSGKKVTRKQLVTYLHGKGVLEDDAQLTGIDKTINNSLSSYGKFLGVFGDELKKDSCQIMVEDIIRDCTIYGDSKKRLRETLQKKYVDNNNLSESQLKRILGFKFKDWGRMSKEFLEMQGINRETGEVMSLVQAMWETNLNLMELIYSEDFTFAEALQEKQAKDYLTLSEFKFEDLDEYYFSAPVKRMVWQTLLIIKELEKVLGAPPKKVFIEMTRSDGVKGDRGRTISRKKQFEDLYKKIKDESQDWASIIDNADASGKLRSQKMYLYLTQMGKCMYTGKPIDLDDLFDDNKYDIDHIYPRHYVKDDNLGNNLVLVEKKANASKGDRYPLDTDIRGKMHGTWKFLKEKGLITEEKYRRLTGSNPFSEEQQADFIARQLVQTSQGTKGVADLLKQLLPDAKIAYSKASNVSDFRRDYDLPKSRLINDFHHANDAYLNIVVGNAYLVKFTQNPLNYIRSGDVQYNLGRMFEKDIVRNGEVAWLADDGKGNHGTIVTVKKVMARNTPMMTRMVLNGHGAIANATLYPASKASADNYIPLKGSDSKIADVTKYGGFTSVSTSRFVLVEHLVKKERIRTLEALPILVANSCKTMEDIENYCEEELGLIAPKVKLDGIKIQSLLKINGFYVHLSGKTNKQLALRNAVNLCLDAKWKEYIHYLEKASNNGNYGNPICSDMNIELYSILAEKHSSSIFAKRPNPVGTKLVKEKETFSKLELVDQVSVLLQILQLSAIGITQADLRAIGGAGIAGKMLISKDISKQEEALLIMQSPTGLYESTIDLKTI

SEQ ID NO: 3213 - protein, 1356 aa, unidentified
  REGION 1..1356: note = Category: MG91 effectors
  REGION 1..1356: note = Description: MG91-405 effector
  source 1..1356: note = uncultivated organism sequence
MKTGNYYVGLDMGTNSVGWAVTDSKYNLIRAKGKDLWGIREFEEARTAADRRSKRVARRRRQRQQVMMGLIRSYFEDEINKIDSQFFQRLDNSFYYLEDKDNAIKDKNVLFNDKNYIDKDYFHEYPTIFHLRKSLIDGTARHDVRFVYLAIINMFKHRGHFLNASLDSDHAYIPMKEILSIFDETASALEKNTWPSLSDFSEQIDKILCDRKISKSKKTEKLNEILGLEKKDEFCEFVKVICGLKSNTAKLFKVEGDETEKKDICFSDAGFDDSLSEIMDVIGEENTELLNSMKNIYDCGVLGEILSGYSFLSEARVALYKKHGDDLKSLKRILKKYNMENEYDFLFREAEAGTYSSYVGSVNCDGNKQRRGMKGRSKEDFYKTVKKILDPLMKSHPQDQDIAFVLEEISKDTFMPKQLTSSNGVIPNQVHAIELKMILKNAEEYLSFLKNKDESGLTVSERIVQLFSYQIPYFIGPTSDKSEKSGGNGWVVRKEPGPVLPWNIEEKIDIGLTNEKFIEKLVRTCTYISGEKVLPKNSILYQKYVVLNEINNIRIDGEKISVELKQDIFNELFLKSNRVTRQKLIKYLNNRGCIQDETQISGLDIKINSGMSTYAKFYSLFGDKMKEDSYVQMAEEIIFLCTVYGDSKKYLRERLIQKCGDSLSEDEIKKIMTMKFSDWGRLSREYITLAGCDKTTGEECTLIGALWNTNLNAMELINNDQFTFHEVLESRRAKDLNTLKDFKSEDLADYYYSAPVKRMIWQTIQILREIESVMGCSPEKVFVEMARRPEDRPKRKDSRKQMFLELYKNIKDEDRNWKELIEREDETGRLRSKKMYLYLTQMGRDMYTGDPIDLDKLFDNNLYDIDHIYPRHYVKDDSIENNLVLVYKPQNANKSDIYPLEKTIRDKQYGFWKGLRNQKLISEEKFNRLVGTKPFTEDQLAGFIARQMVETQQGTKGVAELLGTLLEDSRIVYVKAGNVSDFRRKYGFPKSRIVNDFHHANDAYLNIVVGNVYDVKFTQNPLRFIKDEYLKDKSRNQYNLDKMFDRNIERNGKIAWKAPTEDGEQGTIVTVRRVISKNTPLMTRLSFVGHGQISDETLYGHDDAKAGVYIPFKSRDARLSNVERYGGYNKASIAYFFLVESDNKGKRERTLESVPIYLSGQIKTENDLINYCLNTLGLIKPSIRIAKIRIQSLVEKNGFRFHITGKTNDRLTTRSATSLYVGSDKQSYIHKIEKYIDTGVIEEIMTKEKNIELYDLLTEKHCSGVFSKRPNPVGEKLKLRKEKFKALELPDQLDVLNQVLTLSSIGKAEADLTKIDESKKTGVMLISKKISPEDPVILISQSAIGLYENRINMATV

SEQ ID NO: 3214 - protein, 1119 aa, unidentified
  REGION 1..1119: note = Category: MG91 effectors
  REGION 1..1119: note = Description: MG91-406 effector
  source 1..1119: note = uncultivated organism sequence
MKQILSLDLGITSVGYSVIQEHETDKYSLIDYGVSMFDKPTDKDGNSKKLLHSQALSAKNLHKLRKKRKQNLASLFDQYHLANKQKLLEQERDNLYKNKWELRAKKVFEEKLSVDEIFTILYHIAKHRGYKSLDSGDLLEELCDSLGIETETAKPKKDDEKGQIKQALKSVEALYEEYPQKTVAQIIYELESKKENPIFRNHDNYNYMIRREYINDEIRKIIKAQIAFGAFRAIDDAFINDVIAVIDDQKESTNDLSLFGKCEYYPEYYVAHQYSLLSDIFKMYQAVANITFNKEKIKITKEQIALIAEDFLGKIKKGKSVKDIKYKDIRKVLKLDDDIKIFNKDDSYLNKGKKQENTITKFHFVDTLSKIDKSFVEDIFASDESYRLMREIFDVLHYQKSPKLIYEQLKNKISDEQVIIDLIRNKKGSSLNISSFAMLQLLPYLEEGLTLDEVKQKIGLQRQEDYAQYKKGIKYLHITSYEKDDELEINNHPIKYAVSAALRVVKHLHAEYGTFDEIKVESTRELSLGEKARKEIEKANRAFEKEIEQIVENAEYQKIAKSYGKNLRKYARKILMWEEQERLDIYSGKSIGITDIFSNSVDLDHIVPQSLGGLSVKHNFVLVHRDENLQKSNQLPMNYIKDTQAYTNRVEHLLREHKINWKKAKNLLATNLDEVFKDRLESKSLRATSYIEALTAQMLKRYYPFKDVQKLKDGSAVRHLQGRATSNIRKVLGVMTKSRETNIHHAIDAILIGVTSHSWLQKLSNTFRENFGCIDDEARKNIKKALPYMDGMEIKDLVKEIEEQYNSFGEDSIFYRDIWGKVKTVNFWVSKKPMSSKIHKDTIYAKKGDGIYTVRENIIAKFIGLKVIPMTSPEEFMKKFHKEILQKMYLFKTNPQDVICKLVEQRGEEIKELLWSFEFLDVKNKEQMSEAKTKLELLIHKDLLDNNGNVIRKVKFYQTNLTGFDVRGGLATKEKTFIGFRAYKEDSKLEYERIDVANVEKIQKTNDGSFKAYKNDIVFFIYNDGSFKGGRVVSYIKKSSGSKLCAFLNPRFPTASEYQPSSFCKIEKGKHSGAKQQSIGSAKGIIKLNLDTLGNIKSYQVLGNVESKILDEIKSIVSH

SEQ ID NO: 3215 - protein, 610 aa, unidentified
  REGION 1..610: note = Category: MG91 effectors
  REGION 1..610: note = Description: MG91-407 effector
  source 1..610: note = uncultivated organism sequence
MAKETFVLTLPLKVEKWQADILDKRYELLRQVYNMVQRKLIRQYIYFSQQKEFKDCRNDYKRLREFFASHPFHFRGINGKNGEPSDIKFPYTYESRSSNSGKRPSGGISDYVSKLWTHRIGEEKTLSNFGINSYILEELGLHIMKAWEKRLYDHSSSRVSFKDYGDINSFGSRYKKGNFAGFTINLEEKIITYNANGRQGRYADLIKLPIDFSRDKKYYAVSALKGGIDSLRKLIIVRRCIRGRHKYYLQLTIAGEKPQKGRTLGSGRVGIDIGPSTIAVSSLNGVHFEKLADKCDNIEHELYLVNRKLDRSRRASNPQNFNDDGTIKRISRQKGERRIWNESSRYKQLKQTRRELFRRQAEVRKQQHLEMANAMLSQGDTFIVENNPIDAWVRRAKETTKTKTGKNRCKKRYGKTVAHHAPAMFVSILENKVKSLGGRFYEVDPRNAATQFDFTNGEFTKHEVNERSITLSNGRTHQRDMLSAFNLQHLRPESKETKDYDIEQMQADYPFFCKLEAAEQKRFTETRYNERDALYYVGAYKKQLRRQPQKESVANRHNGGVGRKHCNTSLGSENAKITGNGFVRESIERVSQVPDECHLFVSDPIVLDGL

SEQ ID NO: 3216 - protein, 1122 aa, unidentified
  REGION 1..1122: note = Category: MG91 effectors
  REGION 1..1122: note = Description: MG91-408 effector
  source 1..1122: note = uncultivated organism sequence
MKKILSLDLGITSIGYSVIEEFGNDRYSLIDYGVSMFDKATDKDGNSKKLLHSASTSTSKLYDLRKKRKKDLAQLFHNFGLGDKNSLLSQEKQNIYKNKWYLRCHKAFKEKLNINELFTIFYTLAKHRGYKSLDSSDLLEELCEKLNIPLETKTKKDDERGKIKKALKTIEELKQNSTKTVAQIIYEIELKKENPTFRNHDNYNYMIRREYIDQEIEKIIKTQKDFGLFDDKFDIDNFIEKLKDIITYQNPSTNDMRLFGNCEYYEDEKAAHQYSVISDIFKMYESVSNITFNTKPSIKITKEQINKIADDFFTKIKKGKNIADIKYKDIRKILALSDDTKIFNKDDSYISKGKKVEHTIIKFHFVNNLSKFDNSFIVENLNSLENLKEIFEVLQFEKDPTAIYEKLKDKIEDKQTIINLIKHKSGNSLNISAKAMVEFIPYFKDGLTTDKIKEKLELNRCEDYSKFYKGIKYLNIRQFEQDDNLDINNHPVKYVVSATLRVIKYLHIVCGTFDEIRVESTRELSQNEETKKAIEKANKELEKQINDIVQNKEYQNIAQHYGKNLQKYARKILLYEAQNRRDIYTGEGIEFEDIFTKKVDIDHIVPQSVGGLSVKHNLVLVFRDTNIQKSNQLPMNFVKDKQDFINRVEHLFSEHKINWKKRKNLLATNLDEIYKDTFESKSLRATSYIEALTAQILKRYYPFKDKEKQENGKAVSYIQGRATSNIRKILKVKTKTRDTNIHHAIDAILIGLTNQSWLQKLSNTFRENFGKIDEEARANIKKDMPIFEIIIDDEVKYLEPKELVELIEKNYNYDGENSIFYKDIWGKIKSVNFWVSKKPMVSKIHKDTIYSKKDDGIYTVRENIINHFINLKITPKTSSKKFEEEFNKKILNKMYLFKTNPKDAVCKAIIKRANDIKTLLDSFIDIDTKDKEAMNNAKTKLDELIHKDIPDNNGKPIRKIKFYQTNLTGFDVRGGLATKEKTFIGFKAQIINGKLNYTRIDVANIDKIKKENDNSFKVYKNDLVFFIYTDGTNKGGKIVSFLEDKRIAAFSNPRFPSSIGFQPHFFVTIFNGKANSHKQHSLNKAIGIIKLNLDILGNIKSYQKIGSCESELLEFIKKVIKD

SEQ ID NO: 3217 - protein, 1358 aa, unidentified
  REGION 1..1358: note = Category: MG91 effectors
  REGION 1..1358: note = Description: MG91-409 effector
  source 1..1358: note = uncultivated organism sequence
MQETGKDYYLGLDMGTNSVGWAVTDENYVLMRAKGKDLWGIREFDEALTAVDRRTHRVARRRRQRETARIGLLKEYFHDAIAEADPNFYQRLDNSKYHEEDKDSAVKGKNGIFNDANYTDKDYFKQYPTIFHLRTELIESTEKHDVRLVYLALLNMFKHRGHFLNAGLSTESENTMDTAYHNFVETAAQTIECNFMETVDIEKIKEILGSRDYSRSKKAELVAQLLHVDSKNKVQMACIKCICGLKVTAAAIFGDKMAADEEKKTDICFSDFGYDEKVPVILETVGEENFELVLAMQEIYDIGSLAGIMKDSLYLSMARVKEYEQHGKDLKILKGVVKKYATKEEYDTLFRTMEEGTYSAYVNSVNTKKKSRRDVKKRTRDEFYGRLKKIISTMPQDDSDVLYIKDKMEKEAFLPKQLTASNGVIPNQIHAREMKKILQNAETYLPFLKEKDTSGLTVSERILKLFSFQIPYYVGPVSEKSKLNGGNGWVVRKEEGTVLPWNIEEKIDMTATSREFVERMVRRCSYLSDERVLPKGSLLYERFCVLNEINAIKVDGVKIPVEIKQDLYSKYFKKGKKVTRKKIAEFLIARGVIKEDQTELISGIDIAVNSTLSTYAKFYAIFGEKMEQDSYKKMVEQIVEWCTIYGDAKKFLEQKIKECYGNILTQEEIKRITGFKFRDWGRLSKEFLELSGCSKATGEVMPLISMMWETNDNLMELLDDNYYTYREALEEKQNNAFKLLADIEPEDLDEMYFSAPVKRMVWQTLCIIKELEKVLGKAPKRLFVEMTRNEQKDKKRTDSRKQQFLDLYKNIKDESRDWKELITRADENGTLKSKKMYLYLTQRGRCMYTGHPIDLEDLFKDNRYDIDHIYPRHFVKDDNIMNNLVLVEKEKNAHKSDNYPLEEEIYKKQLPVWKDLHQCKLITDEKFKRLTGRNEFTDEQKAGFIARQLVETSQGTKGVTTILERALPDTKIVYAKASNVSEFRQKRDLLKSRVVNDFHHAQDAYLNIVVGNVYFVKFTQNPLHFIKAEYDKNKAQYEYNLSRMFDRDVRRGNETAWIGCKKGEEAGTIVTVKKMMAKNTPMLTRLSFEGKGGLADQTLYSAEKAKGNGYIPLKTSDAKMQDVTKYGGFNSVSTAYFFLVEHELKGKKVRTLETVPIIWRDRIEKDETMLLKYCTDVLELKNPSIRVKKIKLQSYIKKDGYYMYITGKTNKQITTKNAVELCVNQRWIDYIKIIEKTVEKKKECEEVNYNKNVEFYDLLLTKHTQEIFSNRPNPVGAKLKQGRDKFLSLTLFEQSTVLYEILQLSIIGNTRADLHSIGGAPISGVMLLSKKITDSKEFILINQSVTGLFEQKVDLLTV

SEQ ID NO: 3218 - protein, 1122 aa, unidentified
  REGION 1..1122: note = Category: MG91 effectors
  REGION 1..1122: note = Description: MG91-410 effector
  source 1..1122: note = uncultivated organism sequence
MKKILSLDLGITSIGYSVIIEEEIQRYSLLDYGVSMFDKPTDKDGNSKKLLHSQAISAKKLHQLRKERKKNLAKLFEKYNLASAAKLLGQEKKNIYIHKWQLRAKKVFEEKLSVEEIFTIFYHIAKHRGYKSLDSGDLLEELCVDLGIELEQKKEKKDDEKGKIKQALNNIESLRQEYPEKTVAQIIYDVELQKEQPVFRNHDNYNYMIRREHINDEIVTIISKQKEFGNFENIDSEAFIADLIAVIDDQKESTNDMSLFGKCEYYPKEYVAHQYSLLSDIFKMYQAVANITFNKEKIKISKEQIRLIAEDFLNKIKKGKSVKELKYKDVRKVLNLDDSIKIFNKEDSYQRAGKKVENTITKFHFVDTLFKIDKSFIEDIFSADESYALMREIFDVIHKEKSPKRIYEQLKDKVSSEAVIIDLIRYKKGSSLNISSYAMMKFLPYFEEGMTLDAIKEKLNLNRKEDYSEYKKGIKYLHISTYEKDDSLEINNHPVKYVVSAALRVVKHLHAKHGAFDEIKVESTRELSLNDKVKKEIEKVNKEREKEIEKIVSDKEYQTIAQDYGKNIHKYARKILMWEAQERFDIYSGQSIGLDDIFSNRVDIDHIIPQSLGGLYVQHNLVLVHRDENLQKSNQLPMNYIEDKEAYINRVEHLFSEHKINWKKRKNLLATNLDEIYKDTFESKDLRATSYIEALTANILKRYYPFTDEKKSADGSAVRHVQGRATSNIRKVLDVKTKSRESNIHHAVDALLIGVTNHSWLQKLSNTFRENFGKIDDEARQNIKKTLPYIDGVEVKDIVKEIEQNYNSLGEDSIFYKDIWGRVKTVSFWVSKKPMSSKAHKDTIYADKGDGIFTVRESIIAKFINLKITPTTSPEDFMKKFHKEILEKMYLYKTNPNDVICKIVEQRAEEIKELLWSFEFLDAKNKEEMQEAKAKLENLVHRELFDNNGNVIRKVKFYQTNLTGFKVRGGLATKEKTFIGFRAIKKGEKLEYERIDVSNFEKIKKSNDGSFKVYKNDIVFFIFDEENFKGGKIVSFLEDKTIASFSNPRFPAAIKFQPDSFCIIGKDSNGKPKKSSSKQYKLGKAKGIIKLKIDILGNIESYQVLGNAKSKLLDEIKSIVSH

SEQ ID NO: 3219 - protein, 1358 aa, unidentified
  REGION 1..1358: note = Category: MG91 effectors
  REGION 1..1358: note = Description: MG91-411 effector
  source 1..1358: note = uncultivated organism sequence
MEKEYYLGLDMGTNSVGWAVTDDAYNLIRFKGKDMWGIREFDEANPAVERRTHRTSRRREQRNAVRMGLIRSYFADEIQKVDSNFYQRLDNSFFHVEDKQDNVKDKNGIFNDKNYKDADYYKQYPTIFHLRKELIEDASQKDVRLVYLAVANMFKHRGHFLLSGIGSESSKQTITDLYNQVTGLITEEYGISLKTDIAGTDFEQVLCSREYSRTRKSEKVCEILEIKNSDKLKKAFVKSMCGLSVKITDIIDDTFTEISDEDKKITFSFVDSDYDEKAGVLEEKLGTDVYDIISKLKEIHDKAQVAEIMKNYQYLSFARVADYEKHKKDLKILKRVVKKYFEPTVYDKLFRSEENGTYSAYVNSFNSEEKSRRNYKERKQEDLYNSIKKLLKSVDNVDDTDIEYIKNEMDKENFLPKQLTFKNGVIPNQIHASELKAILKNAEKYLPFLNEKDESGYTVSERILMLFSFQIPYYVGPVSSNSNGWVKRLEPGQVLPWNIDKKIDLKETSEQFIQRMVRNCTYIAGEKVLPKDSLLYENFKVLNEINNLSINGERITVNLKQDLYNTLFLKGKRVTRKQIFNYFHSRGLVEEDSQISGIDIAVNNSLSTYGKFLPLFGEHLKEDKYKKMVDDIVFWCTVYGDSRKFLREQLEEKYSDVLDENQIKRITGMKFKDWGNLSKEFLELSGCCKSTGEVMPLIRAMWETNYNLMELLHSEEFTYSEELEEKQGKIEKVLSEYTIDDLNEEYFSAPVKRMVWQTLLIIKEIEKIMKCPPTRIFVEMTRKDDEKGDNGRKSSRKDQLLALYKKIQSEDKEWKKEMSSRIEDYDKKGALRSKKLYLYFIQKGLDMYTGKPIDLDNLMSANSNYDIDHIYPRHFVKDDNINNNLVLASKPANAEKSDIYPIKDSIYQKMKYTWKVLRDEGLITEEKYKRLTGRNPFTDEQKAGFIARQLVETGQGTKGVADLLTALLPDTKLVYSKAGNVSDFRKKYDIPKSRLINDFHHAHDAYLNIVVGNIYFTKFTSNPLNYIRKECSSKDNKYQYNLGNMYKWDVKRDGKTAWIAAKEGETGTIATVKKMLSRNTPTLTRLTIEGHGGIADATLYSHKKAKQDAYIPLKSSDARMADVTKYGGYSSVTTAYLFLVEHEIKGKKIRTLETVPLYLKDRLENSKEKLEEYCRETLGYTNPSVRMKKIKLQSLIKLNGYYMQISGKTNKQFTVRNYVQFCLNSKWVDYIHKLEKYQDKGVIDDAITDEKNVELYNVLCEKHSVGIFTLRPNPVGDKIKKGYDKFVNLTTEEQIKLLIEIIKLTCVGIVSANLTLIGGASISGKMLISKNITDAKECLLINQSVTGLYENRIDLLRV

SEQ ID NO: 3220 - protein, 1117 aa, unidentified
  REGION 1..1117: note = Category: MG91 effectors
  REGION 1..1117: note = Description: MG91-412 effector
  source 1..1117: note = uncultivated organism sequence
MAHMKKILSLDLGITSIGYSILDELENDRYSLLDYGVSMFDKPTDKDGNSKKLLHSASMSQTNLYNLRKKRKENLAQLFEEFSFGKKEDFLQQERENLHVNKWELRAKKAFQEKLEVSELFSILYLLAKHRGYKSLDSDDLLEELCQKLELHVDITKKKKDDERGKIKAALVNIEHLREQYPHKTVAQIIYEVEKSKQNPTFRNHDNYNYMIRREYINDEIKKIIKAQESFGLFNFTTDEFIAKLIATIDDQKEATIDPSLFGNCEYYPQEKVAHQYSLLSDIFKMYQSVANITFNKEKVKITPQQIHLVANDFFSKLKKGGKNIVDIKYKDIRKVLKLDENIKIFNKDDSYLNRGKKQEHTITKFHFVANLSKMDNTFIIEILEKANPYEIFREIFDVLAYEKAPQTIYDKLKDTIDDETIVSLIKYKNGKSLNISHYAMTRFLPFFEQGLSTDEIKKKLNLERKEDYSQYKKGIKYLHVKSFEHDENLEINNHPVKYVVSAVLRLIKHLHVNHGPFDEIRVESTRELSQNEQTKKDIVKANRALEKEIDVIIANEEYQKIAQHYGKNLRKYARKILMWEEQERFDIYSGKSIGFEDIFTNVVDLDHIVPRSVGGLSVKHNFVLAHRDINVQKSNRLPLDFVVDTEAFINRVEHLFAEHKINWKKKKNLLATTLDETFKDTFESKDLRATSYIEALSAQILKCYYPFTDKKKQHDGSAVRHIQGRATSNIRKLLHVKTKVRDTNIHHAIDAILIGLTNRSWLQKLSNTFRDNLGVIDDEARAKIKKEMPLIEGIEPKELVTMIEDAYNFYGEDSVFYKDVWGKIKVVNFWVSKKPMVSKIHKDTIYAKKEDGIYTVRESIIDKFAELKTTTTTDADTFMKSFEKNVLHKMYLHKTNPKDFTCKAVTNRADAIYELLKSFDSLDKKDKALMSEAKAKLDDLIHRDILDNNTNVIRKVKFFQTNLTGFNIRGGLATKEKTFIGFKAELKDDKLCYERIDVANFNTIKKENDKSFKAYKNDVIFFMYGDGSFRGGKIVSFLEDKKIAAFSNPKFPVSYKFQPDSFCKDKAHTGAKQHALNKAIGIIKLNLDITGKIKSYQSIGTIESELLQFIKEAIHG

SEQ ID NO: 3221 - protein, 603 aa, unidentified
  REGION 1..603: note = Category: MG91 effectors
  REGION 1..603: note = Description: MG91-413 effector
  source 1..603: note = uncultivated organism sequence
MAKENFVLTLPLRVDKCQADILDKRYELLRLIYNMVQQKLVRQYIYFSQQKAFKACESFEQKREFFNTHPFHFKGIKGKNGELCDIKFPYTYESRSSSSGKRPSGGISDYVSKLWSHKVGADKRLVDFGLNGSIMEELGLHVMKAWEDRLYKYKTKRVSFKGYGAINSLGCRYHKGNFAGFTINLEEGFITFNTNGRHGQFADIITLPIDFSREKKGYAAEAFKSGVDSLRKLIIVRRCIRGRNKYYLQLTISGEKPQKGRTLGKGNVGIDIGPSTIATSSLQGVHFDKLADKCDNIEHELYLINRKLDRSRRVNNPENYNPDGTIKRGVRLVWKKDKDVRRYASLKQQRKELYRKQAETRKQQHLEMANAILSQGDTFIVENNPIDAWVRRAKETKKNKTGKIRCKKRYGKSVANHAPAMFVSILKNKVQSLGGMFREVDPGYAATQFDFTNGVFTKHEVSERSITLSNGRTHQRDMLSAFNLQHIGQELKEYDIEQMQADYSIFCRLEAAEQERFKETRRNERDALYFVGAFAKELRHEPQEETVANRHNGGVGRKHCNTLCTENAKITGSGLVRESIERVSEAPEECHHIGNQPIILDGL

SEQ ID NO: 3222 - protein, 530 aa, unidentified
  REGION 1..530: note = Category: MG91 effectors
  REGION 1..530: note = Description: MG91-414 effector
  source 1..530: note = uncultivated organism sequence
MTSQSFVIELPIAVDDAEMRTIVRKLEFARQLHNATLGTAIGQLQQMRQDTAWKQACAMPKGKERTAAFRALDRKYGLTEYDLHSVIARHREGSGRKAELGINETQKIATRVFQAINRYKLGLGGMPRFKSSKRGLHSIEGKTNKTGLKFRPGKKVLNWCGHDYRVLIDPKDDYIQRALKENERSDQYRKIKYCRLVRKRIRSADRFFLQVVLEGTAPVKHVYAPVTERAAIDPGPQSIALFSKAFAGKIQVAGSNNFNEAASRRLLRAMDRSLRRNNPDAYNEDGTINKGAKLAKSKNYQRKVDQLHEMHRVAAAQRKCRHGQTINLLLSIAGDIRIEKNSWKAFQRGHFGKSLGKSAMSGFIAQLKSKAESAGLKVTEVNPYKLKLSQYDPYTDTYRKKDLSERWQEMKAGSGQYIQRDVLSALLLYCADIEKEIHIPKVAVEQLEGAKQLLTDAGYVVLKSTSSRDQRDPRLAPEPKAMTPEMARQKILRGAGDSHLPTDQALGRIRAGGKVSTWSKETFPLQRGVV

SEQ ID NO: 3223 - protein, 530 aa, unidentified
  REGION 1..530: note = Category: MG91 effectors
  REGION 1..530: note = Description: MG91-415 effector
  source 1..530: note = uncultivated organism sequence
MTSQSFVIELPIAVDDAEMRTIVRKLEFARQLHNATLGTAIGQLQQMRQDTAWKQACAMPKGKERTAAFRALDRKYGLTEYDLHSVIARHREGSGRKAELGINETQKIATRVFQAINRYKLGLGGMPRFKSSKRGLHSIEGKTNKTGLKFRPEKKVLNWCGHDYRVLIDPKDDYIQRALKENERSDKYRKIKYCRLVRKRIRSSDRFFLQVVLEGTAPVKHVYAPVTERAAIDPGPQSIALFSKEFAGKIQVAGSNNFNEAASRRLLRAMDRSLRRNNPDAYNENGTIKKGAKLVKSKNYQRKVDRLREMHRVAAAERKCRHGQTINLLLSIAGDIRIEKNSWKAFQRGHFGKSLGKSAMSGFIAQLKSKAASAGLKVTEVNPYKLRLSQYDPYTDTYRKKDLSERWQEMKAGSGLYIQRDVLSALLLYCADIEKEIHIPKVAVEQLEGAKQFLTDAGYVVLKSTSSRDQRDPRLAPEPKAMTPEMARQKILRGAGDSHLPTDQALGRIRAGGKVSTWSKETFPLQRGVV

SEQ ID NO: 3224 - protein, 530 aa, unidentified
  REGION 1..530: note = Category: MG91 effectors
  REGION 1..530: note = Description: MG91-416 effector
  source 1..530: note = uncultivated organism sequence
MPSQSFVIELPIAVDDAEMRTIVRKLEFARQLHNATLGTAMGQLQQMRQDAAWKEACVMPKGKERAAAFRALDRKYGLTEYDLHSVIARHREGSGRKAELGINETQKIATRVFQAINRYKLGLGGMPRFKSSKRGLHSIEGKTNKTGLKFRPEKKVLNWCGHDYRVLIDPKDDYIQRALKENERSDKYRKIKYCRLVRKRIRSSDRFFWQVVLEGTAPVKHVYAPVTERAAIDPGPQSIALFSKAFAGKIQVAGSNNFNEAASRRLLRAMDRSLRRNNPDAYNENGTIKKGAKLVKSKNYQRKVDRLREMHRVAAAERKCRHGQTINLLLSIAGDIRIEKNSWKAFQRGHFGKSLGKSAMSGFIAQLKSKAASAGLKVTEVNPYKLRLSQYDPYTDTYRKKDLSERWQEMKAGSGLYIQRDVLSALLLYCADIEKEIHIPKVAVEQLEGAKQFLTDAGYVVLKSTSSRDQRDPRLAPEPKAMTPEMARQKILRGAGDSHLPTDQALGRIRAGGKVSTWSKETFPLQRGVV

SEQ ID NO: 3225 - protein, 530 aa, unidentified
  REGION 1..530: note = Category: MG91 effectors
  REGION 1..530: note = Description: MG91-417 effector
  source 1..530: note = uncultivated organism sequence
MTSPSFVIELPIAVDDAEMRTIVRKLEFARQLHNATLGTAMGQLQLMRQDAAWKEACVMPKGKERAAAFRALDRKYGLTEYDLHSVIARHREGTGRKAELGINETQKIATRVFQAINRYKLGLGGMPRFKSFKRGLHSIEGKTNKTGLKFKPEQKVLNWCGHDYRVLIDPKDDYIQRALKDNERSDQYRKIKYCRLVRRRIRSADRFFLQVVLEGTAPVKHVYAPVTERAAIDPGPQSIALFSKAFAGKIQVAGSNNFNEAASRRLLRAMDRSLRRNNPDAYNEDGTINKGVKLAKSKNYQRKVDQLHEMHRVAAVQRKCRHGQTINLLLSIAGDIRIEKNSWKAFQRGHFGKSLGKSAMSGFIAQLKSKAESAGLKVTEVNPYKLKLSQYDPYTDTYRKKDLSERWQEMKAGSGQYIQRDVLSALLLYCADIEKEIHIPKAAVEQLEGAKQLLTDAGYVVLKSTSSRDQRDPRLAPEPKAMTPEMARQKILRGAGDSHLPTDQALGRIRAGEKVSTWSKETFPLQRGVV

SEQ ID NO: 3226 - protein, 497 aa, unidentified
  REGION 1..497: note = Category: MG91 effectors
  REGION 1..497: note = Description: MG91-418 effector
  source 1..497: note = uncultivated organism sequence
MTSPTFIIELPIRVSDSESRTILRKLEFARQLHNATLGTALGQLQQLRQDSEWEKACLMPKGKERSELFRKLDRKYQLTEYDLHTVIAKHRQRSGRKTELGINETQKIATRVFQAVNRYKLGLGGRPRFKSLSRGLRSIEGKSNKTGLKFNIEKSVLSWCKHDYCVFIDPQDDFLQRALRSEGRSGFKKVKYCRLVRKTIKGKNRFYLQVVLEGQAPIKHIYASTSERLSIDPGPQTIAVFSDVWAGKIKVSPTAQVDEKRLRCIQRSMDRSLRKSNPDCYESDGTLRKGCVLKKTKGYEKRIQRLQECHRKAAATRRCEHGQLINLLLSMAGDIRVEKNQWKAFQRGHFGKSLGKSGISGFIERLKSKAESAGLKVTEVKPYKLKLSQYDPYTDQYRKKSLNERWHSLGESSEWIQRDVMSALLLQCADLEEEKHIPTEVIKTLEGVKQLLRDAGYVILKPSSNGESNPTFASEPKAVTPEKVRLEIFCGASDSYL

SEQ ID NO: 3227 - protein, 444 aa, unidentified
  REGION 1..444: note = Category: MG91 effectors
  REGION 1..444: note = Description: MG91-419 effector
  source 1..444: note = uncultivated organism sequence
MQGTGKAAGRKAELGINETQKIATRVFQAINRYKLGLGGMPRFKSSKRGLHSIEGKTNKTGLKFRPEKKVLNWCGHDYRVLIDPKDDYIQRALKENERSDKYRKIKYCRLVRKRTRSSDRFFLQVVLEGAAPVKHVYAPVTERAAIDPGPQSIALFSKAFAGKIQVAGSNNFNEAASRRLLRAMDRSLRRNNPDAYNEDGTIKKGAKLAKSKNYQRKVDQLHEMHRVAAAQRKCRHGQTINLLLSIAGDIRIEKNSWKAFQRGHFGKSLGKSAMSGFIAQLKSKAASAGLKVTEVNPYKLKLSQYDPYTDTYRKKDLSERWQEMKAGRGQYIQRDVLSALLLYCADIEKEIHIPKVAVEQLEGAKQFLTDAGYVVLKSTSSRDQRDPRLASEPKAMTPEMARQKILRGAGDSHLPTDQELGQIRAGGKVSTWSKETFPLQRGVV

SEQ ID NO: 3228 - protein, 530 aa, unidentified
  REGION 1..530: note = Category: MG91 effectors
  REGION 1..530: note = Description: MG91-420 effector
  source 1..530: note = uncultivated organism sequence
MPSQSFVIELPIAVDDAEMRTIVRKLEFARQLHNATLGTAMGQSQQMRQDAAWKEACVMPKGKERAAAFRALDRKYGLTEYDLHSIIARHREGSGRKAELGINETQKIATRVFQAINRYKLGLGGMPRFKSSKRGLHSIEGKTNKTGLKFRPEKKVLNWCGHDYRVLIDPKDDYIQRALKENERSDKYRKIKYCRLVRKRIRSSDRFFWQVVLEGTAPVKHVYAPVTERAAIDPGPQSIALFSKAFAGKIQVAGSNNFNEAASRRLLRAMDRSLRRNNPDAYNENGTIKKGAKLVKSKNYQRKVDRLREMHRVAAAERKCRHGQTINLLLSIAGDIRIEKNSWKAFQRGHFGKSLGKSAMSGFIAQLKSKAASAGLKVTEVNPYKLRLSQYDPYTDTYRKKDLSERWQEMKAGSGLYIQRDVLSALLLYCADIEKEIHIPKVAVEQLEGAKQFLTDAGYVVLKSTSSRDQRDPRLAPEPKAMTPEMARQKILRGAGDSHLPTDQALGRIRAGGKVSTWSKETFPLQRGVV

SEQ ID NO: 3229 - protein, 530 aa, unidentified
  REGION 1..530: note = Category: MG91 effectors
  REGION 1..530: note = Description: MG91-421 effector
  source 1..530: note = uncultivated organism sequence
MTSPSFVIELPIAVDDAEMRTIVRKLEFARQLHNATLGTAMGQLQLMRQDAAWKEACVMPKGKERAAAFRALDRKYGLTEYDLHSVIARHREGTGRKAELGINETQKIATRVFQAINRYKLGLGGMPRFKSFKRGLHSIEGKTNKTGLKFKPEQKVLNWCGHDYRVLIDPKDDYIQRALKDNERSDQYRKIKYCRLVRRRIRSADRFFLQVVLEGTAPVKHVYAPVTERAAIDPGPQSIALFSKAFAGKIQVAGSNNFNEAASRRLLRAMDRSLRRNNPDAYNENGTIKKGAKLVKSKNYQRKVDRLREMHRVAAAERKCRHGQTINLLLSIAGDIRIEKNSWKAFQKGHFGKSLGKSAMSGFIAQLKSKAESAGLKVTEVNPYKLKLSQYDPYTDTYRKKDLSERWQEMKAGSGQYIQRDVLSALLLYCANIEKEIHIPKVAVEQLEGAKQFLTDAGYVVLKSTSSRDQRDPRLAPEPKAMTPEMARQKILRGAGDSHLPTDQELGRIRAGGKVSTWSKETFPLQRGVV

SEQ ID NO: 3230 - protein, 497 aa, unidentified
  REGION 1..497: note = Category: MG91 effectors
  REGION 1..497: note = Description: MG91-422 effector
  source 1..497: note = uncultivated organism sequence
MTSPTFIIELPIRVSDSESRTILRKLEFARQLHNATLGTALGQLQQLRQDSEWEKACLMPKGKERSELFRKLDREYQLTEYDLHTVIAKHRQRSGRKTELGINETQKIATRVFQAVNRYKLGLGGRPRFKSLSRGLRSIEGKSNKTGLKFNIEKSVLSWCKHDYCVFIDPQDDFLQRALRSEGRSGFKKVKYCRLVRKTIKGKNRFYLQVVLEGQAPIKHIYASTSERLSIDPGPQTIAVFSDVWAGKIKVSPTAQVDEKRLRCIQRSMDRSLRKSNPDCYESDGTLRKGCVLKKTKGYEKRIQRLQECHRKAAATRRCEHGQLINLLLSMAGDIRVEKNQWKAFQRGHFGKSLGKSGISGFIERLKSKAESAGLKVTEVKPYKLKLSQYDPYTDQYRKKSLNERWHSLGESSEWIQRDVMSALLLQCADLEEEKHIPTEVIKTLEGVKQLLRDAGYVILKPSSNGESNPTFASEPKAVTPEKVRLEIFCGASDSYL

SEQ ID NO: 3231 - protein, 530 aa, unidentified
  REGION 1..530: note = Category: MG91 effectors
  REGION 1..530: note = Description: MG91-423 effector
  source 1..530: note = uncultivated organism sequence
MTSQSFVIELPIAVDDAEMRTIVRKLEFARQLHNATLGTAMGQLQQMRQDAAWKEACVMPKGKERAAAFRALDRKYGLTEYDLHSVIARHREGSGRKAELGINETQKIATRVFQAINRYKLGLGGMPRFKSSKRGLHSIEGKTNKTGLKFRPEKKVLNWCGHDYRVLIDPKDDYIQRALKENERSDKYRKIKYCRLVRKRIRSADRFFLQVVLEGTAPVKHVYAPVTERAAIDPGPQSIALFSKAFAGKIQVAGSNNFNEAASRRLLRAMDRSLRRNNPDAYNEDGTIKKGAKLVKSKNYQRKVDRLREMHRVAAAERKCRHGQTINLLLSIAGDMRIEKNSWKAFQRGHFGKSLGKSAMSGFIAQLKSKAASAGLKVTEVNPYKLKLSQYDPYTDTYRKKDLSERWQEMKAGSGQYIQRDVLSALLLYCADIEKEIHIPKVAVEQLEGAKQLLTDAGYVVLKSTSSRDQRDPRLAPEPKAMTPEMARQKILRGAGDSHLPTDQALGRIRAGGKVSTWSKETFPLQRGVV

SEQ ID NO: 3232 - protein, 530 aa, unidentified
  REGION 1..530: note = Category: MG91 effectors
  REGION 1..530: note = Description: MG91-424 effector
  source 1..530: note = uncultivated organism sequence
MTSPSFVIELPIAVDDAEMRTIVRKLEFARQLHNATLGTAMGQLQQMRQDAAWKEACVMPKGKERAAAFRALDRKYGLTEYDLHSVIARHREGTGRKAELGINETQKIATRVFQAINRYKLGLGGMPRFKSFKRGLHSIEGKTNKTGLKFKPEQKVLNWCGHDYRVLIDPKDDYIQRALKDNERSDQYRKIKYCRLVRRRIRSADRFFLQVVLEGTAPVKHVYAPVTERAAIDPGPQSIALFSKAFAGKIQVAGSNNFNEAASRRLLRAMDRSLRRNNPDAYNEDGTINKGVKLAKSKNYQRKVDQLHEMHRVAAVQRKCRHGQTINLLLSIAGDIRIEKNSWKAFQRGHFGKSLGKSAMSGFIAQLKSKAESAGLKVTEVNPYKLKLSQYDPYTDTYRKKDLSERWQEMKAGSGLYIQHDILSALLLYCADIEKEIHIPKVAVEQLEGAKQFLTDAGYVVLKSTSSRDQRDPRLASEPKAMTPEMARQKILRGAGDSHLPTDQELDRIRAGGKVSTWSKETFPLQRGVV

SEQ ID NO: 3233 - protein, 525 aa, unidentified
  REGION 1..525: note = Category: MG91 effectors
  REGION 1..525: note = Description: MG91-425 effector
  source 1..525: note = uncultivated organism sequence
MTSQSFVIELPIAVDDAEMRTIVRKLEFARQLHNATLGTAMGQLQQMRQDAAWKEACVMPKGKERAAAFRALDRKYGLTEYDLHSVIARHREGSGCKAELGINETQKIATRVFQAINRYKLGLGGMPRFKSSKRGLHSIEGKTNKTGLKFRPEKKVLNWCGHDYRVLIDPKDDYIQRALKENERSDKYRKIKYCRLVRKRIRSADRFFLQVVLEGTAPVKHVYAPVTERAAIDPGPQSIALFSKAFAGKIQVAGSNNFNEAASRRLLRAMDRSLRRNNPDAYNEDGTIKKGAKLVKRKNYQRKVDRLREMHRVAAAERKCRHGQTINLLLSIAGDIRIEKNSWKAFQRGHFGKSLGKSAMSGFIAQLKSKAASAGLKVKEVNPYKLKLSQYDPYTDTYRKKDLSERWQEMKAGSGQYIQRDILSALLLYCADIEKEIHIPKVAVEQLEGAKQFLTDAGYVVLKSTSSRDQRDLRLAPEPKAMTPEMARQKILRGAGDSHLPTDQALGRIRAGGKVSTWSKETFPL

SEQ ID NO: 3234 - protein, 530 aa, unidentified
  REGION 1..530: note = Category: MG91 effectors
  REGION 1..530: note = Description: MG91-426 effector
  source 1..530: note = uncultivated organism sequence
MTSPSFVIELPIAVDDAEMRTIVRKLEFARQLHNATLGTAMGQLQLMRQDAAWKEACVMPKGKERAAAFRALDRKYGLTEYDLHSVIARHREGTGRKAELGINETQKIATRVFQAINRYKLGLGGMPRFKSFKRGLHSIEGKTNKTGLKFKPEQKVLNWCGHDYRVLIDPKDDYIQRALKDNERSDQYRKIKYCRLVRRRIRSADRFFLQVVLEGTAPVKHVYAPVTERAAIDPGPQSIALFSKAFAGKIQVAGSNNFNEAASRRLLRAMDRSLRRNNPDAYNEDGTINKGVKLAKSKNYQRKVDRLHEMHRVAAAQRKCRHGQTINLLLSIAGDIRIEKNSWKAFQRGHFGKSLGKSAMSGFIAQLKSKAESAGLKVTEVNPYKLKLSQYDPYTDTYRKKDLSERWQEMKAGSGQYIQRDVLSALLLYCADIEKEIHIPKAAVEQLEGAKQLLTDAGYVVLKSTSSRDQRDPRLAPEPKAMTPEMARQKILRGAGDSHLPTDQALGRIRAGEKVSTWSKETFPLQRGVV

SEQ ID NO: 3235 - protein, 1047 aa, unidentified
  REGION 1..1047: note = Category: MG91 effectors
  REGION 1..1047: note = Description: MG91-427 effector
  source 1..1047: note = uncultivated organism sequence
MTAFKYYLGLDMGTNSVGWAATDPEYRLLKAKGKDLWGIREFNEASGAVERRTHRISRRRRQREQVRIGILKDYFHDAICEVDPSFFRRLENSKYHEEDKDVEVRYKNNIFNDGNYTDKDYFNEYPTIYHLRNELISSTEKHDVRLVFLALLNMFKHRGHFLNAGLGENNGESNIDNAYFELTELLSELTEYHLSQDIDCKQIEAILSRRDMSRTHKAEELAGVLHVDLKNKPYKELIRGLCGLKFNACVVFPDVQSEEVTKLDICLSESSFDEKSDEIANIIGEDYFEIIMAMKEMFDIGSLASIMKGHNYLSQARVASYTKHKEDLKLLKEVIKKYCGKKEYDKFFNSDADGSYASYVGSYNSKNKERRVGNKRTSEELYKEIKKLLKDAPKEDENVQKILTSIENETFLPKQLTASNGVIPNQVHAREMKKILSNAENYLPFLTEKDETGLSVSERILKLFTFQIPYYVGPTSENSGKNGGNGWVVRREDGQVLPWNIDEKIDMKATSEAFISRMVRRCTYISGEQVLPKASLEYQSYCVLNEINNIKIDGERISVELKQDIYKAVFQKGKKVTKKQLCKYLHTRGIIETEEQVTGVDVSINNALTTYGKFKPIFGEDISKDSVQKMIEDIVFWCTVYGDSKKFLKDRIEEKYGNKLSEEQIKRILGFKFKDWGNLSKKFLELNGADTSTGESISIIRALWNNNLNLMELINSSLYNYKECLAEYQNTMLKTLSEIEAEDLNEYYFSAPVRRIIWQTILVIKELVKVLGCEPERIFVEMTRKPDEHKTRTSSRRNKFEELYKKVKDEATDWMQVIAKAEEDGKIRSKKMYLYLTQKGRCMYTGKHIELDDLFDKNLYDIDHIYPRHFVKDDNIDNNLVLVCKEKNAHKSDHYPIEEEIFLSQKKMWLELRKSGFITEEKYNRLMGRSPFSDEQKAGFIARQLVETSQGTKGVANILRQLLPGSKIVYAKASNVCPTGKIGLLSSMFTNPDYRRKGIAKELLSRVVNDAREYGCGTVQITASDMGVKLYTDFGFVHNDNFMQYKI

SEQ ID NO: 3236 - protein, 412 aa, unidentified
  REGION 1..412: note = Category: MG91 effectors
  REGION 1..412: note = Description: MG91-428 effector
  source 1..412: note = uncultivated organism sequence
MIAKHRQRSGRKTELGINETQKIATRVFQAVNRYKLGLGGRPRFKSLSRGLRSIEGKSNKTGLKFNIEKSVLSWCKHDYCVFIDPQDDFLQRALRSEGRSGFKKVKYCRLVRKTIKGKNRFYLQVVLEGQAPIKHIYASTSERLSIDPGPQTIAVFSDVWAGKIKVSPSAQVDEKRLRCIQRSMDRSLRKSNPDCYESDGTLRKGCVLKKTKGYEKRIQRLQECHRKAAATRRCEHGQLINLLLSMAGDIRVEKNQWKAFQRGHFGKSLGKSGISGFIERLKSKAESAGLKVTEVKPYKLKLSQYDPYTDQYRKKSLNERWHSLGESSEWIQLDVMSALLLQCADLEEEKHIPTEVIKTLEGVKQLLRDAGYVILKPSSNGESNPTFASEPKAVTPEKVRLEIFCGASDSYL

SEQ ID NO: 3237 - protein, 637 aa, unidentified
  REGION 1..637: note = Category: MG91 effectors
  REGION 1..637: note = Description: MG91-429 effector
  source 1..637: note = uncultivated organism sequence
MLTKELRQEALKKGLHYPKVENSVEFYITKNLMIYDFVNENRISMLRVCIAEKKAGIYDTFTKTWADCLLSSFLGKAGISVSERLAFALSAEAKKRLSSGQENFDYLALYKIDQQISYAKNWEKRHTADERKKEISQIMAGTNKRLSAGFTKFNHSLFGDCKRIMYSKSEKAVYCPECESISRISSPPKKGSLYRCPVCRFTAKVSQAENPLTEVHWSCIVQPAGKRSIIRYFCNDFSLQFGKCKIASEEKFRTILEADGSRIELMQTGNGWEDYKEKRYGLYNPSKRDVPYDMYLYGNVKAIQKISAYEHSMLDVWVKQHKNKKNELYTVYLIENYISQYAKNEIFEKLLKCGLNHIAHEAAFHNYNCTFNFNGNKIEDFLNIKMASLEQLRRIINDPFERDIIAMRYLDKNNLYLKDEELKKFLSLNVSNDMKEKIVRFCKFKKVTFYKVNKYVTENADWSSYFDYIGWTEELKYKKSDSVYYPKDFFKTHDRVFKELEEKKDAIQRKKDKEISKKIADLWEQRMQIPQYHYENNDLFVMMPHGTSDLKKEGRSLNHCVADYKEFVAEEKTQIFFIRKKAAPQKSFYTLEIKNHEIEQCHGRNNVDMTEGIRSFAYGFLKQLNTIKENPAVRAAA

SEQ ID NO: 3238 - protein, 497 aa, unidentified
  REGION 1..497: note = Category: MG91 effectors
  REGION 1..497: note = Description: MG91-430 effector
  source 1..497: note = uncultivated organism sequence
MPSPTFIIELPIRVSDSESRTILRKLEFARQLHNATLGTALGQLRQLRQDSEWKKACQMSKGKQRSELFRKLDRKYQLSEYDLHAVIANHRQSSGRKAELGINETQKIATRVFQAVNRYKLGLGGRPRFKSLSRGLRSIEGKSNKTGLKFNIEKSVLSWCKHDYRVFIDPRDDYVQRALHSEDRGGFKKIKYCRLVRKTIKGKNRFYLQVVLEGQAPIKHIYASTSERLSIDPGPQTIAVFTEVWAGKIKVSPTAQVDEKRLCCIQRSMDRSLRKSNPDCYESDGTLRKGCVLKKTKGYEKRIQRLQECHRKAAATRRCEHGQLINLLLSMAGDIRVEKNQWKAFQKGHFGKSLGKSGISGFIERLKSKAESAGLKVTEVKPYKLKLSQYDPYTDQYRKKSLNERWHSLGESSEWIQRDVMSALLLQCADLEEEKHIPTEVIKTLEGVKQLLRDAGYVILKPSSNEESNPTFASEPKAVTPEKVRLEIFCGASDSYL

SEQ ID NO: 3239 - protein, 530 aa, unidentified
  REGION 1..530: note = Category: MG91 effectors
  REGION 1..530: note = Description: MG91-431 effector
  source 1..530: note = uncultivated organism sequence
MTSPSFVIELPIAVDDAEMRTIVRKLEFARQLHNATLGTAMGQLQQMRQDAAWKEACVMPKGKERAAAFRALDRKYGLTEYDLHSVIARHREGTGRKAELGINETQKIATRVFQAINRYKLGLGGMPRFKSFKRGLHSIEGKTNKTGLKFKPEQKVLNWCGHDYRVLIDPKDDYIQRALKDNERSDQYRKIKYCRLVRRRIRSADRFFLQVVLEGTAPVKHVYAPVTERAAIDPGPQSIALFSKEFAGKIQVAGSNNFNEAASRRLLRAMDRSLRRNNPDAYNENGTIKKGAKLVKSKNYQRKVDRLREMHRVAAAERKCRHGQTINLLLSIAGDIRIEKNSWKAFQRGHFGKSLGKSAMSGFIAQLKSKAASAGLKITEVNPYKLRLSQYDPYTDTYRKKDLSERWQEMKAGSGLYIQRDVLSALLLYCADIEKEIHIPKVAVEQLEGAKQFLTDAGYVVLKSTSSRDQRDPRLASEPKAMTPEMARQKILRGAGDSHLPTDQELGQIRAGGKVSTWSKETFPLQRGVV

SEQ ID NO: 3240 - protein, 537 aa, unidentified
  REGION 1..537: note = Category: MG91 effectors
  REGION 1..537: note = Description: MG91-432 effector
  source 1..537: note = uncultivated organism sequence
MSTKSFIISLPIITGGQDRRRLRKSFSFGCNLQNAVMGGGWDRVLQMRATAEWQATRAMPKGRERTKAFRDLRVRFRLSEYDFHADVAKHRKASGRGHLLGINECQKLASRAWISVERHLYNGGAPRFISSRRGLHSIEGKTNRTGIIWKADQQCVTVCKHVYRVRVDKRDDWLTRALQDPTDPTKPRKVKYCRIVREMRKGKERFFLQLVAEGSSPLKHAYAGKDLRMAIDPGLGSLTYATEDGTIAKVQIAPSADTDHRAIRRIQRAMERSRRATNPDNYEAVDVVRHGKKKKSFKVKSGRLQWRFSKRYESLRAELAEIFRLSAATRKREHGEVCNWLLGHAGHIIVEDNSYKAFQRGRFGKTIGRHAPAALYAQLTNKAESAGLLVEVVSPKKLKPTQHNLLTGQFVKHELWERRVRLGEDDDERWIDRDAAACLNLLYADIENQTYAPERIREAVLAGVTAWLDAGVVVIQAREGITEREFGRFRRRGIPSLTVQGLRQQGFRGRSDSKSGATPRRKASTVSKPSHFSGEVV

SEQ ID NO: 3241 - protein, 537 aa, unidentified
  REGION 1..537: note = Category: MG91 effectors
  REGION 1..537: note = Description: MG91-433 effector
  source 1..537: note = uncultivated organism sequence
MSTKSFIISLPIITGGQDRRRLRKSFSFGCNLQNAVMGGGWDCVLKMRATPEWQAARAMPKGSERTKAFRDLRMRFRLSEYDFHADVAKHRKASGRGHLLGINECQKLASRAWISVERHLYNGGSPRFISSRRGLHSIEGKTNRTGIIWKADQQCVTVCKHVYRVRVDKRDDWLTRALQDPTDPKKPRKVKYCRIVREMRKGKERFLLQLVAEGTSPLKHAYAGKDLRMAIDPGLGSLTYATEDGTIAKVQIAPSADTDHRAVRKLQRAMERSRQATNPDNYETVEVVRHGKKHKSLKVKSGRLQWRFSKRYEKLRSELAEMLRLCAATRKREHGEVCNWLLGHAGHIIVEDNSYKAFQRGRFGKTIGRHAPAALYAQLTNKAESAGLLVEVVSPKKLKPSQHNLLTDTFVKHELWERRVRLGNDDDDRWIDRDAAACLNLLYADLEKQTYAPERIREAVLAGVTAWLDAGVVVIQAREGITEREFGRFRRRGIPSLTVQGLRQQGFRGRSDSKSGATPRRKASTVSKPSHFSGEVV

SEQ ID NO: 3242 - protein, 497 aa, unidentified
  REGION 1..497: note = Category: MG91 effectors
  REGION 1..497: note = Description: MG91-434 effector
  source 1..497: note = uncultivated organism sequence
MTSPTFIIELPIRVSDSESRTILRKLEFARQLHNATLGTALGQLQQLRQDSEWDKACLMPKGKERSELFRKLDRKYQLTEYDLHTVIAKHRQRSGRKTELGINETQKIATRVFQAVNRYKLGLGGRPRFKSLSRGLRSIEGKSNKTGLKFNIEKSVLSWCKHDYRVFIDPQDDYLQRALRSEGRSGFKKVKYCRLVRKTIKGKNRFYLQVVLEGQAPIKHIYASTSERLSIDPGPQTIAVFSDVWAGKIKVSPTAQVDEKRLRCIQRSMDRSLRKSNTDCYESDGTLRKGCVLKKTKGYEKRIQRLQECHRKAAATRRCEHGQLINLLLSMAGDIRVEKNQWKAFQRGHFGKSLGKSGISGFIERLKSKAESAGLKVTEVKPYKLKLSQYDPYTDQYRKKSLNERWHSLGESSEWIQRDVMSALLLQCADLEEEKHIPTEVIKTLEGVKQLLRDAGYVILKPSSNGESNPTFASEPKAVTPEKVRLEIFCGASDSYL

SEQ ID NO: 3243 - protein, 525 aa, unidentified
  REGION 1..525: note = Category: MG91 effectors
  REGION 1..525: note = Description: MG91-435 effector
  source 1..525: note = uncultivated organism sequence
MTSQSFVIELPIAVDDAEMRTIVRKLEFARQLHNATLGTAMGQLQQMRQDAAWKEACVMPKGKERAAAFRALDRKYGLTEYDLHSVIARHREGSGRKAELGINETQKIATRVFQAINRYKLGLGGMPRFKSSKRGLHSIEGKTNKTGLKFRPEKKVLNWCGHDYRVLIDPKDDYIQRALKENERSDQYRKIKYCRLVRKRIRSADRFFLQVVLEGTAPVKHVYAPVTERAAIDPGPQSIALFSKAFAGKIQVAGSNNFNEAASRRLLRAMDRSLRRNNPDAYNEDGTIKKGAKLVKSKNYQRKVDRLREMHRVVAAERKCRHGQTINLLLSIAGDIRIEKNSWKAFQRGHFGKSLGKSAMSGFIAQLKSKAASAGLKVTEVNPYKLKLSQYDPYTDTYRKKDLSERWQEMKAGSGQYIQRDILSALLLYCADIEKEIHIPKVAVEQLEGAKQFLTDAGYVVLKSTSSRDQRDLRLAPEPKAMTPEMARQKILRGAGDSHLPTDQALGRIRAGGKVSTWAKETFPL

SEQ ID NO: 3244 - protein, 530 aa, unidentified
  REGION 1..530: note = Category: MG91 effectors
  REGION 1..530: note = Description: MG91-436 effector
  source 1..530: note = uncultivated organism sequence
MTSPSFVIELPIAVDDAEMRTIVRKLEFARQLHNATLGTAMGQLQLMRQDAAWKEACVMPKGKERAAAFRALDRKYGLTEYDLHSVIARHREGTGRKAELGINETQKIATRVFQAINRYKLGLGGMPRFKSFKRGLHSIEGKTNKTGLKFKPEQKVLNWCGHDYRVLIDPKDDYIQRALKDNERSDQYRKIKYCRLVRRRIRSADRFFLQVVLEGTAPVKHVYAPVTERAAIDPGPQSIALFSKAFAGKIQVAGSNNFNEAASRRLLRAMDRSLRRNNPDAYNEDGTINKGVKLAKSKNYQRKVDQLHEMHRVAAVQRKCRHGQTINLLLSIAGDIRIEKNSWKAFQRGHFGKSLGKSAMSGFIAQLKSKAESAGLKVTEVNPYKLKLSQYDPYTDTYRKKDLSERWQEMKAGSGQYIQRDVLSALLLYCANIEKEIHIPKVAVEQLEGAKQFLTDAGYVVLKSTSSRDQRDPRLASEPKAMTPEMARQKILRGAGDSHLPTDQELGQIRAGGKVSTWSKETFPLQRGVV

SEQ ID NO: 3245 - protein, 530 aa, unidentified
  REGION 1..530: note = Category: MG91 effectors
  REGION 1..530: note = Description: MG91-437 effector
  source 1..530: note = uncultivated organism sequence
MTSPSFVIELPIAVDDAEMRTIVRKLEFARQLHNATLGTAMGQLQLMRQDAAWKEACVMPKGKERAAAFRALDRKYGLTEYDLHSVIARHREGTGRKAELGINETQKIATRVFQAINRYKLGLGGMPRFKSFKRGLHSIEGKTNKTGLKFKPEQKVLNWCGHDYRVLIDPKDDYIQRALKDNERSDQYRKIKYCRLVRRRIRSADRFFLQVVLEGTAPVKHVYAPVTERAAIDPGPQSIALFSKAFAGKIQVAGSNNFNEAASRRLLRAMDRSLRRNNPDAYNEDGTINKGVKLAKSKNYQRKVDRLHEMHRVAAAQRKCRHGQTINLLLSIAGDIRIEKNSWKAFQRGHFGKSLGKSAMSGFIAQLKSKAASAGLKVTEVNPYKLRLSQYDPYTDTYRKKDLSERWQEMKAGSGQYIQRDVLSALLLYCADIEKEIHIPKVAVEQLEGAKQFLTDAGYVVLKSTSSRDQRDPRLAPEPKAMTPEMARQKILRGAGDSHLPTDQELGRIRAGGKVSTWSKETFPLQRGVV

SEQ ID NO: 3246 - protein, 538 aa, unidentified
  REGION 1..538: note = Category: MG91 effectors
  REGION 1..538: note = Description: MG91-438 effector
  source 1..538: note = uncultivated organism sequence
MTTQTFILELPIKADDSQSRTISKKFEYGRMLYNATLGSGLGRLTQMRQDPEWRCACEMSKGKERNELFRRLNRQYRLTEYDFHSDIARHREGTKRKSELGICEAQKLATQAFNAVSRYMFKQGGRPRFKSFKRGLHSLEGKTNTTGLKFKPEKMLLDWCRKTYQVMLDPEDTYALEALYADKERTKFKRIKYNRIVCRNIKGVKRFYLQVVLEGTPPVKHAYAPASERMAIDPGPKAFAVFCPRVQAKVQIAPQAKVNEKAIRRIQRSMDRSLRAKNPNAFDEKGRIKPGVSLAYSKGYQARLTKLREAHRKVAGTRKCEHGELANLLLECAGNIRIEKNSWEAFKRSHFGRSINNSAASGFIQKLKSKAERAGLTVEEVSPYRLKPSQYDPYKDEFVKKALGERWMYLGDESTVIQRDIMSAILIYFADLKNQTHNPEVVKTNLEGLKRGLTDAGYVKHLKLPRSSGSKDPLFAPEPKALTTEELRSKCFRVDSDRHSSTINGTDGKAVGWSETFPLTGELFRDSVLSSVSARGAS

SEQ ID NO: 3247 - protein, 537 aa, unidentified
  REGION 1..537: note = Category: MG91 effectors
  REGION 1..537: note = Description: MG91-439 effector
  source 1..537: note = uncultivated organism sequence
MSTKSFIINLPIITGDQDRRRLRKSFSFGCNLQNAVMGGGWDRVLKMRATPEWQTARAMPKGSERTKAFRDLRVRFRLNEYDFHADVAKHRKASGRGHLLGINECQKLASRAWISVERHLYNGGSPRFISSRRGLHSIEGKTNRTGIIWKADQQCVTVCKHVYRVRVDKRDDWLTRALQDPTDPTKPRKVKYCRIVREMRKGKERFLLQLVAEGTSPLKHAYAGKDLRMAIDPGLGSLTYATEDGTIAKVQIAPSADTDHRAVRKLQRAMERSRQATNPDNYEAVDVVRHGKKKKSFKVKSGRLQWRFSKRYEKLRSELAEMLRLCAATRKREHGEVCNWLLGHAGSIIVEDNSFKAFQKGHFGKSIGRHAPAAFYTQLTSKAESAGLQVTVVSPRKLKPSQHNLLTDTFVKHELWERRVRLGNDDDDRWIDRDAAACLNLLYADLEKQTYAPERIREAVLAGVTAWLDAGVVVIQAREGYTEREFGRFRRRGIPSLTVQGLRQQGFRGRSDSKSGATPRRKASTVSKPSHFSGEVV

SEQ ID NO: 3248 - protein, 639 aa, unidentified
  REGION 1..639: note = Category: MG91 effectors
  REGION 1..639: note = Description: MG91-440 effector
  source 1..639: note = uncultivated organism sequence
MLTKELRQEALKKGFHYPKVEKSVEFYRTKNLMIYDFVNENRISMLRVCIAEKKAGIYDTFTKTWADCLLSSFLGKAGISVSELLAFALSAEAKKRLSSGHDNFDYLALYKIDQQISYAKNWEKRHPADERKKEISQIMAGTNKRLSAGFIKFNLDLFGDCKRIMYSKSEKAVYCPECESISRISSPPKKGSLYRCPVCCFTAKVSQAENPLTEVHWSCIVQPAGKRSIIRYFCNDFSLQFGKCKIASEEKFRTILEAGGSRIELMQTGNGWEDYKEKRYGLYYPSKRDVPYDMFLYGNVKAILKIPVYEHSMLDVWVKQHKNKKNELYTVYLIENYISQYAKNEIFEKLLKFGLNHIAHEAAFHNYNRTFNFNGNKIEDFLNIKMASLKQLRRIINDPFERDIIAMRYLDKNNLYLKDEELKKFLSLNVSNDMKEKIVRFCKFKKVTFYKVNNYVTENANADWSSYFDYIGWTEELEYKKSDSVYYPKKFFKTHDRVFKELEEKKDAIQRKKDKEISKKIAGLWEQRMQIPQYHYENNDLFVMMPHGTSDLKKEGRSLNHCVADYKEFVAEEKTQIFFIRKKAAPQKSFYTLEIKNHEIEQCHGRNNVDMTEEIRSFAYGYLKQLNTLNEKAAVKAVA

SEQ ID NO: 3249 - protein, 525 aa, unidentified
  REGION 1..525: note = Category: MG91 effectors
  REGION 1..525: note = Description: MG91-441 effector
  source 1..525: note = uncultivated organism sequence
MTSQSFVIELPIAVDDAEMRTIVRKLEFARQLHNATLGTAMGQLQQMRQDAAWKEACVMPKGKERAAAFRALDRKYGLTEYDLHSVIARHREGSGRKAELGINETQKIATRVFQAINRYKLGLGGMPRFKSSKRGLHSIEGKTNKTGLKFRPEKKVLNWCGHDYRVLIDPKDDYIQRALKENERSDKYRKIKYCRLVRKRIRSADRFFLQVVLEGTAPVKHVYAPVTERAAIDPGPQSIALFSKAFAGKIQVAGSSNFNEAASRRLLRAMDRSLRRNNPDAYNEDGTIKKGAKLVKSKNYQRKVDRLREMHRVAAAERKCRHGQTINLLLSIAGDIRIEKNSWKAFQRGHFGKSLGKSAMSGFIAQLKSKAASAGLKVTEVDPYKLKLSQYDPYTDTYRKKDLSERWQEMKAGSGQYIQRDILSALLLYCADIEKEIHIPKVAVEQLEGAKQFLTDAGYVVLKSTSSRDQRDLRLAPEPKAMTPEMARQKILRGAGDSHLPTDQALGRIRAGGKVSTWSKETFPL

SEQ ID NO: 3250 - protein, 633 aa, unidentified
  REGION 1..633: note = Category: MG91 effectors
  REGION 1..633: note = Description: MG91-442 effector
  source 1..633: note = uncultivated organism sequence
MLTKELRQEALKKGFHYPKVEKSVEFYRTKNLMIYDFVCEESAVVRVCISKQHAGIYDVLNNIWKDCTLENYLEDPNQFTNYILSERAKKLLKTDSLFFDSKASFAIDAQIRKAKNWKKINQKENREKEIKKIMAGTNKPVPSGFKIFSEKLLCSAKRIMYSAKEKSLYCPECGNTFQLPDVPKKGSLHTCPACGYSTKVSSAQYLNDIHWSCIVQAAGKRSIIRYFCNELFIEYGKCSTILYEKYRTIVEEDGSMVPLMQTSEGWKDYKGKNYSYFYTVPKREVPNDMYLYGTVEALMKMPALKNSMLDVWVKQHIGADKKLCSEYLVENYIKVYAQTTIYEKLLKHGLNKIAHEAAFYYDSSFHKNEEKVDKFLNLTKGNLDRLREFIPDPSGSNVSAMRYLEKYNVYLKDDELKTFLRLEVSDNMKEQIVKFCKCKKVTLYKINKYVTENANADWSSYFDYIGWTEELDYKKSDSVYYPKKFFKTHDRVFKELEEKKDAIQRKKDKEISKKIADLWEQRMQIPQYHYENNDLFVMMPHGTSDLKKEGRSLNHCVAGYKEFVAEEKTQIFFIRKKAAPQKSFYTLEIKNHDIEQCHGKNNVNMTEEIRAFAYGFLNQLKTIKEKPAVRAAA

SEQ ID NO: 3251 - protein, 525 aa, unidentified
  REGION 1..525: note = Category: MG91 effectors
  REGION 1..525: note = Description: MG91-443 effector
  source 1..525: note = uncultivated organism sequence
MTSQSFVIELQIAVDDAEMRTIVRKLEFARQLHNATLGTAMGQLQQMRQDAAWKEACVMPKGKERAAAFRALDRKYGLTEYDLHSVIARHREGSGRKAELGINETQKIATRVFQAINRYKLGLGGMPRFKSSKRGLHSIEGKTNKTGLKFRPEKKVLNWCGHDYRVLVDPKDDYIQRALKENERSDKYRKIKYCRLVRKRIRSADRFFLQVVLEGTAPVKHVYAPVTERAAIDPGPQSIALFSKAFAGKIQVAGSNNFNEAASRRLLRAMDRSLRRNNPDAYNEDGTIKKGAKLVKSKNYQRKVDRLREMHRVAAAERKCRHGQTINLLLSIAGDIRIEKNSWKAFQRGHFGKSLGKSAMSGFIAQLKSKAASAGLKVKEVNPYKLKLSQYDPYTDTYRKKDLSERWQEMKAGSGQYIQRDVLSALLLYCADIEKEIHIPKVAVEQLEGAKQFLTDAGYVVLKSTSSRDQRDLRLAPEPKAMTPEMARQKILRGAGDSHLPTDQALGRIRAGGKVSTWSKETCPL

SEQ ID NO: 3252 - protein, 634 aa, unidentified
  REGION 1..634: note = Category: MG91 effectors
  REGION 1..634: note = Description: MG91-444 effector
  source 1..634: note = uncultivated organism sequence
MLTKDLKQEALKRGFLHSGVNDSIEAYRTRNLTIYDFVCEESAVVRVCISKQHAGIYDVLSNIWKDCMLENYLEDPNQFANYMLSECAKKLLKTDSLFFDSKASFAIDAQIRKAKNWKKINQKENREKEIKKIMAGTNKPVPSGFKIFSEKLLCSAKRIMYSAKEKSLYCPECGNTFQLPDVPKKGSVHTCPACGYRAKVSCVQYQLNDIHWSCIVQAAGKRSVIRYFCNELLLEYGKCSTIFYEKYRTIIEEDGSMVPLMQTSEGWNDYKAKNYSFFYTVPKREVPNDMYLYGTVDALMKMPVLKNSMLDVWVKQHIGADKKLCSEYLVENYIKIYAKTTIYEKLLKCGLNKIAHEAAFYYGSSFHMDEKKIDKFLNLTKGNLNRLREFIPDPSGSNVSAMRYLEKYNVYLKDDELKTFLRLEVSDNMKEQIVKFCKCKKVTLYKINKYVTENANADWSSYFDYIGWTEELDYKKSDSVYYPKKFFKTHDRVFKELEEKKDAIQRKKDKEISKKIAGLWEQRMQIPQYHYEDSQFIVIMPHGTSDLKKEGKSLNHCVVSYKEYVAEKSTQIFFIRKKTDPHKSFYTLEIKNHEIAQCHGKNNVDMTEEIRAFAYGFLNQLNTIKEKPAVRAAA

SEQ ID NO: 3253 - protein, 489 aa, unidentified
  REGION 1..489: note = Category: MG91 effectors
  REGION 1..489: note = Description: MG91-445 effector
  source 1..489: note = uncultivated organism sequence
MLYNATLGSGLGRLTQMRQDPEWRRALGMVKGKERNELFRRLNRQYRLTEFDFHADIARHREGTKRKSELGINEAQKLATQAFNAVSRYMFKQGGRPRFKSFKRGLHSIEGKTNKTGLKFKPDQMILDWCRKTYQVMLDPKDAYALDALYADKERTQFKRIKYNRIVCRNIKGVKRFYLQVVLEGTPPVKHAYAPASERMAIDPGPKAFAVFCPRVQAKVQVAPRAKVNEKAIRRIQRSMDRSLRATNPNAFDEKGRIKPGVSLAYSKGYQVHLTNLREAHRKAAGTRKCEHGELANLLLECAGNIRIEKNSWEAFKRSHFGRSINNSAASGFIQRLKSKAERAGLTVEEISPFRLKPSQYDPYKDEFVKKALGERWMYLGDESTVIQRDIMSAILIYFADLKNQTHNPEVVKASLEGLKRGLTDAGYVKHLKLPRSSGSKDPLFAPEPKALTTEELRSKCFRVASNSHSSTLNGTDGKAVGWSETFWL

SEQ ID NO: 3254 - protein, 525 aa, unidentified
  REGION 1..525: note = Category: MG91 effectors
  REGION 1..525: note = Description: MG91-446 effector
  source 1..525: note = uncultivated organism sequence
MTSQSFVIELQIAVDDAEMRTIVRKLEFARQLHNATLGTAMGQLQQMRQDAAWKEACVMPKGKERAAAFRALDRKYGLTEYDLHSVIARHREGSGRKAELGINETQKIATRVFQAINRFKLGLGGMPRFKSSKRGLHSIEGKTNKTGLKFRPEKKVLNWCGHDYRVLIDPKDDYIQRALKENERSDQYRKIKYCRLVRKRIRSSDRFFLQVVLEGTAPVKHVYAPVTERAAIDPGPQSIALFSKAFAGKIQVAGSNNFNEAASRRLLRAMDRSLRRNNPDAYNENGTIKKGAKLVKSKNYQRKVDRLREMHRVAAAERKCRHGQTINLLLSIAGDIRIEKNSWKAFQKGHFGKSLGKSAMSGFIAQLKSKAASAGLKVTEVNPYKLKLSQYDPYTDTYRKKDLSERWQEMKAGSGQYIQRDILSALLLYCADIEKEIHIPKVAVEQLEGAKQFLTDAGYVVLKSTSSRDQRDPRLAPEPKAMTPEMARQKILRGAGDSHLPTDQALGRIRAGEKVSTWSKETFPL

SEQ ID NO: 3255 - protein, 525 aa, unidentified
  REGION 1..525: note = Category: MG91 effectors
  REGION 1..525: note = Description: MG91-447 effector
  source 1..525: note = uncultivated organism sequence
MTSQSFVIELQIAVDDAEMRTIVRKLEFARQLHNATLGTAMGQLQQMRQDAAWKEACVMPKGKERAAAFRALDRKYGLTEYDLHSVIARHREGSGRKAELGINETQKIATRVFQAINRYKLGLGGMPRFKSSKRGLHSIEGKTNKTGLKFRPEKKVLNWCGHDYRVLIDPKDDYIQRALKENERSDQYRKIKYCRLVRKRIRSSDRFFLQVVLEGTAPVKHVYAPVTERAAIDPGPQSIALFSKAFAGKIQVAGSNNFNEAASRRLLRAMDRSLRRNNPDAYNENGTIKKGAKLVKSKNYQRKVDRLREMHRVAAAERKCRHGQTINLLLSIAGDIRIEKNSWKAFQKGHFGKSLGKSAMSGFIAQLKSKAASAGLKVTEVNPYKLKLSQYDPYTDTYRKKDLSERWQEMKAGSGQYIQRDILSALLLYCADIEKEIHIPKVAVEQLEGAKQFLTDAGYVVLKSTSSRDQRDPRLAPEPKAMTPEMARQKILRGAGDSHLPTDQALGRIRAGEKVSTWSKETFPL

SEQ ID NO: 3256 - protein, 525 aa, unidentified
  REGION 1..525: note = Category: MG91 effectors
  REGION 1..525: note = Description: MG91-448 effector
  source 1..525: note = uncultivated organism sequence
MTSQSFVIELPIAVDDAEMRTIVRKLEFARQLHNATLGTAMGQLQQMRQDAAWKEACVMPKGKERAAAFRALDRKYGLTEYDLHSVIARHREGSGRKAELGINETQKIATRVFQAINRYKLGLGGMPRFKSSKRGLHSIEGKTNKTGLKFRPEKKVLNWCGHDYRVLIDPKDDYIQRALKENERSDKYRKIKYCRLVRKRIRSADRFFLQVVLEGTAPVKHVYAPVTERAAIDPGPQSIALFSKAFAGKIQVAGPNNFNEAASRRLLRAMDRSLKRNNPDAYNEDGTIKKGAKLVKSKNYQRKVDRLREMHRVSAAERRCLHGQTINLLLSIAGDIRIEKNSWKAFQRGHFGKSLGKSAMSGFIAQLKSKAESAGLKVTEVNPYKLKLSQYDPYTDTYRKKALSERWQEMKAGSGQYIQRDVLSALLLYCADIEKEIHIPKAAVEQLEGAKQLLTDAGYVVLKSTSSRDQRDPRLAPEPKAMTPEMARQKILRGAGDSHLPTDQALGRIRAGEKVSTWSKETFPL

SEQ ID NO: 3257 - protein, 537 aa, unidentified
  REGION 1..537: note = Category: MG91 effectors
  REGION 1..537: note = Description: MG91-449 effector
  source 1..537: note = uncultivated organism sequence
MSTKSFIISLPIITGDQDRRRLRKSFSFGCNLQNAVMGGGWDRVLQMRATPEWQATRAMPKGRERTKAFRDLRVRFRLSEYDFHADVAMHRKASGRGHLLGINECQKLASRAWISVERHLYNGGSPRFISSRRGLHSIEGKTNRTGIIWKADQQCVTVCKHVYRVRVDKRDDWLTRALQDPTDPTKPRKVKYCRIVREMRKGKERFLLQLVAEGTSPLKHAYAGKDLRMAIDPGLGSLTYATEDGTIAKVQIAPSADTDHRAIRRIQRAMERSRRATNPDNYEAVDVVRHGKKKKSFKVKSGRLQWRFSKRYESLRAELAEIFRLSAATRKREHGEVCNWLLGHAGSIIVEDNSFKAFQKGHFGKSIGRHAPAAFYTQLTSKAESAGLQVTVVSPRKLKPSQHNLLTDTFVKHELWERRVRLGNDDDDRWIDRDAAACLNLLYADLEKQTYAPERIREAVLAGVTAWLDAGVVVIQAREGITEREFGRFRRRGIPSLTVQGLRQQGFRGRSDSKSGTTPRRKASTVSKPSHFSGEVV

SEQ ID NO: 3258 - protein, 530 aa, unidentified
  REGION 1..530: note = Category: MG91 effectors
  REGION 1..530: note = Description: MG91-450 effector
  source 1..530: note = uncultivated organism sequence
MTYQSFVIELPIAVDDAEMRTIVRKLEFARQLHNATLGTAIGQLQQMRQDTAWKQACAMPKGKERTAAFRALDRKYGLTEYDLHSVIARHREGSGRKAELGINETQKIATRVFQAINRYKLGLGGMPRFKSSKRGLHSIEGKTNKTGLKFRPEKKVLNWCGHDYRVLIDPKDDYIQRALKENERSDQYRKIKYCRLVRKRIRSADRFFLQVVLEGTAPVKHVYSPVTERAAIDPGPQSIALFSKAFAGKIQVAGSNNFNEAASRRLLRAMDRSLRRNNPDAYNEDGTINKGAKLAKSKNYQRKVDQLHEMHRVAAAQRKCRHGQTINLLLSIAGDIRIEKNSWKAFQRGHFGKSLGKSAMSGFIAQLKSKAESAGLKVTEVNPYKLKLSQYDPYTDTYRKKDLSERWQEMKAGSGQYIQRDVLSALLLYCADIEKEIHIPKVAVEQLEGAKQLLTDAGYVVLKSTSSRDQRDPRLAPEPKAMTPEMARQKILRGAGDSHLPTDQALGRIRAGGKVSTWSKETFPLQRGVV

SEQ ID NO: 3259 - protein, 537 aa, unidentified
  REGION 1..537: note = Category: MG91 effectors
  REGION 1..537: note = Description: MG91-451 effector
  source 1..537: note = uncultivated organism sequence
MSTKSFIISLPIITGDQDRRRLRKSFSFGCNLQNAVMGGGWDRVLQMRATPEWQATRAMPKGRERTKAFRDLRVRFRLSEYDFHADVAKHRKASGRGHLLGINECQKLASRAWISVERHLYNGGSPRFISSRRGLHSIEGKTNRTGIIWKADQQCVTVCKHVYRVRVDKRDDWLTRALQDPTDPTKPRKVKYCRIVREMRKGKERFLLQLVAEGTSPLKHAYAGKDLRMAIDPGLGSLTYATEDGTIAKVQIAPSADTDHRAIRRIQRAMERSRRATNPDNYEAVDVVRHGKKKKSFKVKSGRLQWRFSKRYESLRAELAEIFRLSAATRKREHGEVCNWLLGHAGHIIVEDNSYKAFQRGRFGKTIGRHAPAAFYTQLTSKAESAGLQVTVVSPRKLKPSQHNLLTDTFVKHELWERRVRLGNDDDDRWIDRDAAACLNLLYADLEKQTYAPERIREAVLAGVTAWLDAGVVVIQAREGITEREFGRFRRRGIPSSTVQGLRQQGFRGRSDSKSGATPRRKASTVSKPSHFSGEVV

SEQ ID NO: 3260 - protein, 514 aa, unidentified
  REGION 1..514: note = Category: MG91 effectors
  REGION 1..514: note = Description: MG91-452 effector
  source 1..514: note = uncultivated organism sequence
MRAKNSKDDVNSAVMTTPTFVLELPVKLGQGELAEVRKRFNYARNLYNATVGTALGQLQQMRQDPQWRQACSMSKGKERTTTFRRLDEKYRLREYDLHAIIAKHREASGRKHDLGINEAQKLATRVYEVVTKYKLGLGGKPRFKTQSRGLHSISGKTNKTGLRFKPEKSRLYWNSLEMFVEIDRKDRYIFEALHVDNDPSRFKRIKYCSLVRKVINGKERYYLQLSLEGQAPIKHIYAPQTERLAIDPAPKAITVFHKEKVFKASIEVSVHAEKQKKLQKQMSRSLQLNNPDAFDENGTLKKGARLQVKSKSYLKKQTKLCEVYRRAAAARKNLHGQVSNLLLSLAGEIVLEKNSWKALQRGHFGKSLGKSGMGAFERTLISKAERAGCKVHLVAPYILKPSQYDPFKDAFEKIPLKQRWRRMDDKELIQRDMLSAVLLYCADLANERHNRTEIFQTLEGAKQLLSDGGFVVKENPTSNPALDPRFAPERKAQAIEEVRREILCGCKGQLNANR

SEQ ID NO: 3261 - protein, 497 aa, unidentified
  REGION 1..497: note = Category: MG91 effectors
  REGION 1..497: note = Description: MG91-453 effector
  source 1..497: note = uncultivated organism sequence
MTSPTFIIELPIRVSDSESRTILRKLEFARQLHNATLGTALGQLQQLRQDSEWEKACLMPKGKERSELFRKLDRKYQLTEYDLHTVIAKHRQRSGRKTELGINETQKIATRVFQAVNRYKLGLGGRPRFKSLSRGLRSIEGKSNKTGLKFNIEKSVLSWCKHDYRVFIDPQDDYLQRALRSEDRGGFKKIKYCRLVRKTIKGKNRFYLQVVLEGQAPIKHVYASSSERLSIDPGPQTIAVFSEVWAGKIKVSPTAQVDEKRLRCIQRSMDRSLRKSNPDCYESDGTLKKGCVLKKTKGYEKRIQRLQECHRKAAATRRCEHGQLINLLLSMAGDIRVEKNQWKAFQRGHFGKSLGKSGISGFIERLKSKAESAGLKVTEVRPYKLKLSQYDPYTDQYRKKSLNERWHSLGEGSEWIQRDVMSALLLQCADLEEEKHIPTEVIKTLEGVKQFLRDAGYVILKPSSNGESNPAFASEPKAVTPEKVRLEIFCGASDSYL

SEQ ID NO: 3262 - protein, 530 aa, unidentified
  REGION 1..530: note = Category: MG91 effectors
  REGION 1..530: note = Description: MG91-454 effector
  source 1..530: note = uncultivated organism sequence
MTSQSFVIELPIAVDDAEMRTIVRKLEFARQLHNATLGTAIGQLQQMRQDTAWKQACAMPKGKERTAAFRALDRKYGLTEYDLHSVIARHREGSGRKAELGINETQKIATRVFQAINRYKLGLGGMPRFKSSKRGLHSIEGKTNKTGLKFRPGKKVLNWCGHDYRVLIDPKDDYIQRALKENERSDQYRKIKYCRLVRKRIRSADRFFLQVVLEGTAPVKHVYAPVTERAAIDPGPQSIALFSKAFAGKIQVAGSNNFNEAASRRLLRAMDRSLRRHNPDAYNEDGTINKGAKLAKSKNYQRKVDQLHEMHRVAAAQRKCRHGQTINLLLSIAGDIRIEKNSWKAFQRGHFGKSLGKSAMSGFIAQLKSKAESAGLKVTEVNPYKLKLSQYDPYTDTYRKKDLSERWQEMKAGSGQYIQRDVLSALLLYCADIEKEIHIPKVAVEQLEGAKQLLTDAGYVVLKSTSSRDQRDPRLAPEPKAMTPEMARQKILRGAGDSHLPTDQALGRIRAGGKVSTWSKETFPLQRGVV

SEQ ID NO: 3263 - protein, 497 aa, unidentified
  REGION 1..497: note = Category: MG91 effectors
  REGION 1..497: note = Description: MG91-455 effector
  source 1..497: note = uncultivated organism sequence
MTSPTFIIELPIRVSDSESRTILRKLEFARQLHNATLGTALGQLQQLRQDSEWEKACLMPKGKERSELFRKLDRKYQLTEYDLHAVIAKHRRASGRKAELGINETQKIATRVFQAVNRYKLGLGGRPRFKSLSRGLRSIEGKSNKTGLKFNIEKFVLSWCKHDYRVFIDPQDDYLQRALRSEGRSGFKKVKYCRLVRKIIKGKNRFYLQVVLEGKAPIKHIYASTNERLSIDPGPQTIAVFSNVWTGKIKVSPNAQIDEKKIRRIQRSMDRSLRKSNPDCYESDGTLKKGCVLKKTKGYEKRIQRLQECHRKAAATRRCEHGQLINLLLSMAGDIRVEKNQWKAFQRGHFGKSLGKSGISGFIERLKSKAESAGLKVTEVRPYKLKLSQYDPYTDQYRKKSLNERWHSLGEGSEWIQRDVMSALLLQCADLEEEKHIPTEVIKTLEGVKQFLRDAGYVILKPSSNGESNPAFASEPKAVTPEKVRLEIFCGTSDSYL

SEQ ID NO: 3264 - protein, 498 aa, unidentified
  REGION 1..498: note = Category: MG91 effectors
  REGION 1..498: note = Description: MG91-456 effector
  source 1..498: note = uncultivated organism sequence
MSGPTFIIELPIRVSDSESQTILRKLEFARQLHNATLGSALGQLQQLRQDSDWKKACSMPKGKERTSLFKLLDRKYHLTEYDLHAVIAKHRQASGRKTELGINEAQKIATRVFQAVNRYKLGLGGRPRFKSAKRGLRSIEGKTNKTGLKFNIEKSVLSWCKHDYRVIINPKDDYIRRAFLKEDGSKGFKTIKYCRLVRKTIKGKNRFYLQVVLEGYAPVKHIYASTEERLSIDPGPQTIAVFSKMWSGKIKVAPHAQVDEQRIRNLQRSMDRSLRQNNPDCYERNGVFKKGSELSRTKSYEKRVQNLKEYHRKASATRRCEHGQLINLLLSVAGEIRIEKNSWKAFQRGHFGKSLGKSGISGFIEQLKSKAESASLKVVEVKPYKLKLSQYDPYTETYEKKALNERWHRLGRSSEWIQRDVMSALLLQCADIENDKHIPTEVIKTLEGAKQLLRDAGYVILKPSSNGDNCQPFASEPKAVTPEKVRLEIFCGTDDSHL

SEQ ID NO: 3265 - protein, 537 aa, unidentified
  REGION 1..537: note = Category: MG91 effectors
  REGION 1..537: note = Description: MG91-457 effector
  source 1..537: note = uncultivated organism sequence
MSTKSFIISLPIITGGQDRRRLRKSFSFGCNLQNAVMGGGWDRVLQMRATAEWQATRAMPKGRERTKAFRDLRVRFRLSEYDFHADVAKHRKASGRGHLLGINECQKLASRAWISVERHLYNGGSPRFISSRRGLHSIEGKTNRTGIIWKADQQCVTVCKHVYRVRVDKRDDWLTRALQDPTDPTKPRKVKYCRIVREMRKGKERFFLQLVAEGSSPLKHAYAGKDLRMAIDPGLGSLTYATEDGTIAKVQIAPSADTDHRAVRKLQRAMERSRQATNPDNYEAVDVVRHGKKKKSFKVKSGRLQWRFSKRYKSLRAELAEIFRLSAATRKREHGEVCNWLLGHAGHIIVEDNSYKAFQRGRFGKTIGRHAPAALYAQLTNKAESAGLLVEVVSPKKLKPTQHNLLTGQFVKHELWERRVRLGEDDDERWIDRDAAACLNLLYADIENQTYAPERIREAVLAGVTAWLDAGVVVIQAREGITEREFGRFRRRGIPSLTVQGLRQQGFRGRSDSKSGATPRRKASTVSKPSHFSGEVV

SEQ ID NO: 3266 - protein, 530 aa, unidentified
  REGION 1..530: note = Category: MG91 effectors
  REGION 1..530: note = Description: MG91-458 effector
  source 1..530: note = uncultivated organism sequence
MTSLSFVIELPIAVDDAEMRTIVRKLEFARQLHNATLGTAMGQLQQMRQDAAWKEACVMPKGKERAAAFRALDRKYGLTEYDLHSVIARHREGSGRKAELGINETQKIATRVFQAINRYKLGLGGMPRFKSSKRGLHSIEGKTNKTGLKFRPEKKVLNWCGHDYRVLINPKDDYIQRALKENERSDKYRKIKYCRLVRKRIRSADRFFLQVVLEGTAPVKHVYAPVTERAAIDPGPQSIALFSKAFAGKIQVAGSNNFNEAASRRLLRAMDRSLRRNNPDAYNEDGTIKKGAKLVKSKNYQRKVDRLREMHRVAAAERKCRHGQTINLLLSIAGDIRIEKNSWKAFQRGHFGKSLGKSAMSGFIAQLKSKAASAGLKVTEVNPYKLKLSQYDPYTDTYRKKDLSERWQEMKAGSGQYIQRDVLPALLLYCADIEKEIHIPKVAVEQLEGAKQLLTDAGYVVLKSTSSRDQRDPRLAPEPKAMTPEMARQKILRGAGDSHLPTDQALGRIRAGGKVSTWSKETFPLQRGVV

SEQ ID NO: 3267 - protein, 352 aa, unidentified
  REGION 1..352: note = Category: MG91 effectors
  REGION 1..352: note = Description: MG91-459 effector
  source 1..352: note = uncultivated organism sequence
MSKKTVSARVNTNIPAEVPQDVRPRFLSVQNYRLLLAVTRFSTDYAQGVVRINNMQEMNCQELKTPEVLESTACQGECKKKFTRNNAKSLFCVVDKSVDLDDVARRWSKFRFMCKDCSDQYIFTEPYHVVQLYPSVGLDNIKVLCDEGFITKYVFPIKLECTEVVTQTEVPNYHDFYKVVKSIVKDKKPHEQITKLQLLTYGRVLFTETDYDCVMKSTVDPYGEMATELEFYPQHSSMMAFLPTYKDTKPLTYIYRVVKQVYSSNYDNYVVYFPIKCTLYCKLCKDNKIYLKVHPVLYCSQCGFTDALFFRKSTVMANTMFFKECVKSKTQKPRRIIYYDMVLYKTMVKKLK

SEQ ID NO: 3268 - protein, 376 aa, unidentified
  REGION 1..376: note = Category: MG91 effectors
  REGION 1..376: note = Description: MG91-460 effector
  source 1..376: note = uncultivated organism sequence
MMKKVTTTTTTSAAIKKKVSAKVNTNREDDSLKDLRGRFLSNQNYQLMKYVLRFATAYAQGTLRVNDLKEMNCDDLKYGEVTTSACCQGECGKKFNGAKILFCVIDSEDGAGDIEDKFKLVCHFCSNDYSYQKRYEVMQLYPTVSLPVVERLCEVGFITKYIFPIELDYTVTTTRTEVCNFHNFYKMVKSIIREKKSNEHITEIRLSTYGRDLFVETDDNCIMKNGINEYSEHFYELDFPSSPSTMLPFVQTYKETKLLTYFYTVTKRVYYSFFDYVVHFPIKCTRFCKLCKEDKLYLKTHPVLYCSKCGFTDAAFFKNAPFLKTTVFLAKCVKAKTLSPTRIYYYDMNEYKSYINKPPPSAAGAKNAGKKTNKKK

SEQ ID NO: 3269 - protein, 388 aa, unidentified
  REGION 1..388: note = Category: MG91 effectors
  REGION 1..388: note = Description: MG91-461 effector
  source 1..388: note = uncultivated organism sequence
MKKTTTTTVISSSKKKVSAKVNTNRRDDDDSKFKDLRGRFLSNQNFQLMKYVLRFATNYVQGTYFVNDLKEMECTDLKYGEVERRTVCQGGCGKKFTGGNKLLFCVIDNNGTDVDDEQYEKFKVVCHVCSNDYAYKRRYEVMQLFPTVSLSVVERLCEVGFITKYIFPIDLEYTVTETRTEVCNYHNFYKMVKSIIREKKTNEHITEIKLSTYGRDLFIETDENCAMRNGQNEYNEHVYELEFHPSPSTMIPFVQTYAEKKPLTYFYTVTKRVYLSFFDYAVCFPIKCINYCKMCKQDKLYFKINPVLYCSKCGFTDASFFKNAPFLKNTVFLAKCVKAKTLPPTRIYYYDMNLYKSYMNKASLSSSPTASKNKLFDFKPKALKFGKI

SEQ ID NO: 3270 - protein, 388 aa, unidentified
  REGION 1..388: note = Category: MG91 effectors
  REGION 1..388: note = Description: MG91-462 effector
  source 1..388: note = uncultivated organism sequence
MKKTTTTTVISSSKKKVSAKVNTNRRDDDDSKFKDLRGRFLSNQNFQLMKYVLRFATNYVQGTYFVNDLKEMECTDLKYGEVERRTVCQGGCGKKFTGGNKLLFCVIDNNGDDVDDGQYEKFKVVCHVCSNDYAYKRRYEVMQLFPTVSLSVVERLCEVGFITKYIFPIDLEYTVTETRTEVCNYHNFYKMVKSIIREKKTNEHITEIKLSTYGRDLFIETDENCAMRNGQNEYNEHVYELEFHPSPSTMIPFVQTYAEKKPLTYFYTVTKRVYLSFFDYAVCFPIKCINYCKMCKQDKLYFKINPVLYCSKCGFTDASFFKNAPFLKNTVFLAKCVKAKTLPPTRIYYYDMNLYKSYMNKASLSSSPTASKNKLFDFKPKALKFGKI

SEQ ID NO: 3271 - protein, 389 aa, unidentified
  REGION 1..389: note = Category: MG91 effectors
  REGION 1..389: note = Description: MG91-463 effector
  source 1..389: note = uncultivated organism sequence
MKKTTTTTVISSSKKKVSAKVNTNRDDDDSKFKDLRGRFLSNQNFQLMKYVLRFATNYVQGTYLVNDLKEMECTDLKYGEVERRTVCQGGCGKKFTGGNKLLFCVIDNNGDDDDVDDGGNEKFKVVCHVCSNDYAYKRRYEVMQLFPTVSLSVVERLCEVGFITKYIFPIDLEYTVTETRTEVCNYHNFYKMVKSIIREKKTNEHITEIKLSTYGRDLFIETDDNCAMRNGQNEYNEHVYELEFHPSPSTMIPFVQTYAEKKPLTYFYTVTKRVYLSFFDYAVCFPIKCINYCKMCKQDKLYFKINPVLYCSKCGFTDASFFKNAPFLKNTVFLAKCVKAKTLPPTRIYYYDMNLYKSYMNKASLSSSPTASKNKLFDFKPKALKFGKI

SEQ ID NO: 3272 - protein, 353 aa, unidentified
  REGION 1..353: note = Category: MG91 effectors
  REGION 1..353: note = Description: MG91-464 effector
  source 1..353: note = uncultivated organism sequence
MKKSVSIKVPAKVNTNIGDEKPKDLRNRFLSTQNYRLLSAVSRFATDYVQGVLRVNDLVEMKCNELKGQDLVDSAVCQGECRKKFSKGAKYLFCVVDSAADVNDVTQRWNKFKLVCNTCSNDYAFNAQYEVMQLYPTVSLADVERMCEVGFLTKYIFPIKLEYTESRTETEVPGYHNFYKIVKSIVKDKKHNEQISKIQLCTYGRDLFTETDYDCAMKSGVDAYGDMTFELEFYPRDSNMMAFLETYKDTKPLTYFYRVTKRIYSSRFDYVVYFPIKCTRYCKFCKASKIYAKNNPVLYCSQCGFTDAMFFKNSPLLSSVTFYDECVKSKTLKPKRIFYYDMALYKTMSKKLK

SEQ ID NO: 3273 - protein, 497 aa, unidentified
  REGION 1..497: note = Category: MG91 effectors
  REGION 1..497: note = Description: MG91-465 effector
  source 1..497: note = uncultivated organism sequence
MTSPTFIIELPIRVSDSESRTILRKLEFARQLHNATLGTALGQLQQLRQDSEWEKACLMPKGKERSELFRKLDRKYQLTEYDLHTVIAKHRQRSGRKTELGINETQKIATRVFQAVNRYKLGLGGRPRFKSLSRGLRSIEGKSNKTGLKFNIEKSVLSWCKHDYRVFIDPQDDFLQRALRSEGRSGFKKVKYCRLVRKTIKGKNRFYLQVVLEGQAPIKHIYASTSERLSIDPGPQTIAVFSDVWAGKIKVSPTAQVDEKRLRCIQRSMDRSLRKSNPDCYESDGTLRKGCVLKKTKGYEKRIQRLQECHRKAAATRRCEHGQLINLLLSMAGDIRVEKNQWKAFQRGHFGKSLGKSGISGFIERLKSKAESAGLKVTEVKPYKLKLSQYDPYTDQYRKKSLNERWHSLGESSEWIQRDVMSALLLQCADLEEEKHIPTEVIKTLEGVKQLLRDAGYVILKPSSNGESNPTFASEPKAVTPEKVRLEIFCGASDSYL

SEQ ID NO: 3274 - protein, 497 aa, unidentified
  REGION 1..497: note = Category: MG91 effectors
  REGION 1..497: note = Description: MG91-466 effector
  source 1..497: note = uncultivated organism sequence
MPSPTFIIELPIRVSDSESRTILRKLEFARQLHNATLGTALGKLQQLRQDSEWKRACLMPKGKERSELFRKLDRKYQLSEYDLHAVIANHRQSSGRKAELGINETQKIATRVFQAVNRYKLGLGGRPRFKSLSRGLRSIEGKSNKTGLKFNIEKSVLSWCKHDYRVFIDPQDDYLQRALRSEGRSGFKKVKYCRLVRKTIKGKNRFYLQVVLEGQAPIKHIYASTNERLSIDPGPQTIAVFSNVWAGKIKVSPNAQIDEKKIRRIQRSMDRSLRKSNPDCYESDGTLKKDCVLKKTKGCEKRIQRLQECHRKVAATRQCEHGELINLLLSVAGDIRVEKNQWKAFQRGHFGKSLGKSGISGFIERLKSKAESAGLKVTEVKPYKLKLSQYDPYTDQYRKKSLNERWHSLGESSEWIQRDVMSALLLQCADLEEEKHIPTEVIKTLEGAKQLLRDAGYVILKPSSNGESNPTFASEPKAVTPEKVRLEIFCGTSDSYL

SEQ ID NO: 3275 - protein, 530 aa, unidentified
  REGION 1..530: note = Category: MG91 effectors
  REGION 1..530: note = Description: MG91-467 effector
  source 1..530: note = uncultivated organism sequence
MTSQSFVIELPIAVDDAEMRTIVRKLEFARQLHNATLGTAMGQLQQMRQDAAWKEACVMPKGKERAAAFRALDRKYGLTEYDLHSVIARHREGSGRKAELGINETQKIATRVFQAINRYKLGLGGMPRFKSSKRGLHSIEGKTNKTGLKFRPEKKVLNWCGHDYRVLIDPKDDYIQRALKENERSDKYRKIKYCRLVRKRIRSADRFFLQVVLEGTAPVKHVYAPVTERAAIDPGPQSIALFSKAFAGKIQVAVSNNFNEAASRRLLRAMDRSLRRNNPDAYNEDGTIKKGAKLVKSKNYQRKVDRLREMHRVAAAERKCRHGQTINLLLSIAGDIRIEKNSWKAFQRGHFGKSLGKSAMSGFIAQLKSKAASAGLKVTEVTPYKLKLSQYDPYTDTYRKKDLSERWQEMKAGSGQYIQRDILSALLLYCADIEKEIHIPKVAVEQLEGAKQFLTDAGYVVLKSTSSRDQRDLRLAPEPKAMTPEMARQKILRGAGDSHLPTDQALGRIRAGGKVSTWSKETFPLQRGVV

SEQ ID NO: 3276 - protein, 349 aa, unidentified
  REGION 1..349: note = Category: MG91 effectors
  REGION 1..349: note = Description: MG91-468 effector
  source 1..349: note = uncultivated organism sequence
MKKSAIAKVNTNKSDESPKDLRSRFLSTQNYRLLSAVSRFATDYVQGILRVNDLAEMRCQELKGRELLESTSCQGECRKKFSKSAKYLYCIIDSAVNVNDPSQRWNKFKFVCNSCSNDFAFNAQYEVIQLFPTVSLEDVERLCAVGFLTKYIFPIKLEYTESKTETEVPNYHNFYKIVRSIVKDKKHNEQIIKIQLSTYGRDLFIETDHNCTMRSGVDAYGDVTFDLEFYPRDSNMMSFLSTYKDTKPLTYFYRVTKRIYTSRFDYVVYFPIKCTRYCKLCKDSKIYMKTNPVLYCSQCGFTDAMFFQNSIMLSSVMFIDECVKSKTLKPKRIFYYDMALYKNIIKKLK

SEQ ID NO: 3277 - protein, 530 aa, unidentified
  REGION 1..530: note = Category: MG91 effectors
  REGION 1..530: note = Description: MG91-469 effector
  source 1..530: note = uncultivated organism sequence
MTSQSFVIELPIAVDDAEMRTIVRKLEFARQLHNATLGTALGQLQQMRQDTAWKQACAMPKGKERAAAFRALDRKYGLTEYDLHSVIARHREGTSRKAELGINETQKIATRVFQAINRYKLGLGGMPRFKSSKRGLHSIEGKTNKTGLKFRPEKKVLNWCGHDYRVLIDPKDDYIQRALKENERSDKYRKIKYCRLVRKRIRSADRFFLQVVLEGTAPVKHVYAPVTERAAIDPGPQSIALFSKAFAGKIQVAGSNNFNEAASRRLLRAMDRSLRRNNPDAYNEDGTIKKGAKLVKSKNYQRKVDRLREMHRVAAAERKCRHGQTINLLLSIAGDIRIEKNSWKAFQRGHFGKSLGKSAMSGFIAQLKSKAASAGLKVTEVNPYKLKLSQYDPYTDTYRKKDLSERWQEMKAGSGQYIQRDILSALLLYCADIEKEIHIPKVAVEQLEGAKQFLTDAGYVVLKSTSSRDQRDLRLAPEPKAMTPEMARQKILRGAGDSHLPTDQALGRIRAGGKVSTWSKETFPLQRGVV

SEQ ID NO: 3278 - protein, 537 aa, unidentified
  REGION 1..537: note = Category: MG91 effectors
  REGION 1..537: note = Description: MG91-470 effector
  source 1..537: note = uncultivated organism sequence
MSTKSFIISLPIITGGQDRRRLRKSFSFGCNLQNAVMGGGWDCVLKMRATPEWQAARAMPKGSERTKAFRDLRMRFRLSEYDFHADVAKHRKASGRGHLLGINECQKLASRAWISVERHLYNGGSPRFISSRRGLHSIEGKTNRTGIIWKADQQCVTVCKHVYRVRVDKRDDWLTRALQDPTDPKKPRKVKYCRIVREMRKGKECYFLQLVAEGTSPLKHAYAGKDLRMAIDPGLGSLTYATEDGTIAKVQIAPSADTDHRAVRKLQRAMERSRQATNPDNYETVEVVRHGKKHKSLKVKSGRLQWRFSKRSENLRAELAEIFRLSAATRKREHGEVCNWLLGHAGHIIVEDNSYKAFQRGRFGKTIGRHAPAALYAQLTNKAESAGLLVEVVSPKKLKPTQHNLLTGQFVKHELWERRVRLGEDDDERWIDRDAAACLNLLYADIENQTYAPERIREAVLAGVTAWLDAGVVVIQAREGITEREFGRFRRRGIPSLTVQGLRQQGFRGRSDSKSGATPRRKASTVSKPSHFSGEVV

SEQ ID NO: 3279 - protein, 537 aa, unidentified
  REGION 1..537: note = Category: MG91 effectors
  REGION 1..537: note = Description: MG91-471 effector
  source 1..537: note = uncultivated organism sequence
MSTKSFIISLPIITGDQDRRRLRKSFSFGCNLQNAVMGGGWDRVLKMRATAEWQTARAMPKSSERTKAFRDLRVRFRLSEYDFHADVAKHRKASGRGHLLGINECQKLASRAWISVERHLYNGGSPRFISSRRGLHSIEGKTNRTGIIWKADQQCVTVCKHVYRVRVDKCDDWLTRALQDPTDPTKPRKVKYCRIVREMRKGKERFLLQLVAEGTSPLKHAYAGKDLRMAIDPGLGSLTYATEDGTIAKVQIAPSADTDHRAIRRIQRAMERSRRATNPDNYEAVDVVRHGKKKKSFKVKSGRLQWRFSKRYESLRAELAEIFRLSAATRKREHGEVCNWLLGHAGHIIVEDNSYKAFQRGRFGKTIGRHAPAALYAQLTNKAESAGLLVEVVSPKKLKPTQHNLLTGQFVKHELWERRVRLGEDDDERWIDRDAAACLNLLYADIENQTYAPERIREAVLAGVTAWLDAGVVVIQAREGITEREFGRFRRRGIPSLTVQGLRQQGFRGRSDSKSGATPRRKASTVSKPSHFSGEVV

SEQ ID NO: 3280 - protein, 530 aa, unidentified
  REGION 1..530: note = Category: MG91 effectors
  REGION 1..530: note = Description: MG91-472 effector
  source 1..530: note = uncultivated organism sequence
MPSQSFVIELPIAVDDAEMRTIVRKLEFARQLHNATLGTAMGQLQQMRQDAAWKEACVMPKGKERAAAFRALDRKYGLTEYDLHSVIARHREGSGRKAELGINETQKIATRVFQAINRYKLGLGGMPRFKSSKRGLHSIEGKTNKTGLKFRPEKKVLNWCGHDYRVLIDPKDDYIQRALKENERSDKYRKIKYCRLVRKRIRSSDRFFWQVVLEGTAPVKHVYAPVTERAAIDPGPQSIALFSKAFAGKIQVAGSNNFNEAASRRLLRAMDRSLRRNNPDAYNENGTIKKGAKLVKSKNYQRKVDRLREMHRVAAAERKCRHGQTINLLLSIAGDIRIEKNSWKAFQRGHFGKSLGKSAMSGFIAQLKSKAASAGLKVTEVNPYKLRLSQYDPYTDTYRKKDLSERWQEMKAGSGLYIQRDVLSALLLYCADIEKEIHIPKVAVEQLEGAKQFLTDAGYVVLKSTSSRDQRDPRLASEPKAMTPEMSRQKILRGAGDSHLPTDQALGRIRAGGKVSTWSKETFPLQRGVV

SEQ ID NO: 3281 - protein, 497 aa, unidentified
  REGION 1..497: note = Category: MG91 effectors
  REGION 1..497: note = Description: MG91-473 effector
  source 1..497: note = uncultivated organism sequence
MTSPTFIIELPICVSDSESRTILRKLEFARQLHNATLGTALGQLQQLRQDSEWEKACLMPKGKERSELFIKLDRKYQLTEYDLHTVIAKHRQRSGRKTELGINETQKIATRVFQAVNRYKLGLGGRPRFKSLSRGLRSIEGKSNKTGLKFNIEKSVLSWCKHDYRVFIDPQDDYLQRALRSEGRSGFKKVKYCRLVRKTIKGKNRFYLQVVLEGQAPIKHIYASTNERLSIDPGPQTIAVFSDVWAGKIKVSPTAQVDEKRLRCIQRSMDRSLRKSNPDCYESDGTLRKGCVLKKTKGYEKRIQRLQECHRKAAATRRCEHGQLINLLLSMAGDIRVEKNQWKAFQRGHFGKSLGKSGISGFIERLKSKAESAGLKVTEVKPYKLKLSQYDPYTDQYRKKSLNERWHSLGESSEWIQRDVMSALLLQCADLEEEKHIPTEVIKTLEGVKQLLRDAGYVILKPSSNGESNPTFASEPKAVTPEKVRLEIFCGASDSYL

SEQ ID NO: 3282 - protein, 583 aa, unidentified
  REGION 1..583: note = Category: MG91 effectors
  REGION 1..583: note = Description: MG91-474 effector
  source 1..583: note = uncultivated organism sequence
MLTKDLKQEALKRGFLHSGVNDSIEAYRTRNLTIYDFVCEESAVVRVCISKQHAGIYDVLSNIWKDCMLENYLEDPNQFANYMLSECAKKLLKTDSLFFDSKASFAIDAQIRKAKNWKKINQKENREKEIKKIMAGTNKPVPSGFKIFSEKLLCSAKRIMYSAKEKSLYCPECGNTFQLPDVPKKGSLHTCPACGYSTKVSSAQYLNDIHWSCIVQAAGKRSIIRYFCNELFIEYGKCSTILYEKYRTIVEEDGSMVPLMQTSEGWKDYKGKNYSYFYTVPKREVPNDMYLYGTVEALMKMPALKNSMLDVWVKQHIGADKKLCSEYLVENYIKVYAQTTIYEKLLKHGLNKIAHEAAFYYDSSFHKNEEKVDKFLNLTKGNLDRLREFIPDPSGSNVSAMRYLEKYNVYLKDDELKTFLRLEVSDNMKEQIVKFCKCKKVTLCKINKYVTENANADWSSYFDYIGWTEELDYKKSDSVYYPKKFFKTHDRVFKELEEKKDAIQRKKDKEISKKIADLWEQRMQIPQYHYENNDLFVMMPHGTSDLKKEGRSLNHCVAGYKEFVAEEKTQIFFKQLRKNRSIH

SEQ ID NO: 3283 - protein, 537 aa, unidentified
  REGION 1..537: note = Category: MG91 effectors
  REGION 1..537: note = Description: MG91-475 effector
  source 1..537: note = uncultivated organism sequence
MSTKSFIISLPIITGDQDRRRLRKSFSFGCNLQNAVMGGGWDRVLKMRATPEWQTARAMPKSSERTKAFRDLRVRFRLSEYDFHADVAMHRKASGRGHLLGINECQKLASRAWISVERHLYNGGSPRFISSRRGLHSIEGKTNRTGIIWKADQQCVTVCKHVYRVRVDKRDDWLTRALQDPTDPTKPRKVKYCRIVREMRKGKERFLLQLVAEGTSPLKHAYAGKDLRMAIDPGLGSLTYATEDGTIAKVQIAPSADTDHRAVRKLQRAMERSRQATNPDNYETVEVVRHGKKHKSLKVKSGRLQWRFSKRYEKLRSELAEMLRLCAATRKREHGEVCNWLLGHAGHIIVEDNSYKAFQRGRFGKTIGRHAPAALYAQLTNKAESAGLLVEVVSPKKLKPSQHNLLTDTFVKHELWERRVRLGNDDDDRWIDRDAAACLNLLYADLEKQTYAPERIREAVPAGVTAWLDAGVVVIQAREGITEREFGRFRRRGIPSLTVQGLRQQGFRGRSDSKSGTTPRRKASTESKPSHFSGEVV

SEQ ID NO: 3284 - protein, 530 aa, unidentified
  REGION 1..530: note = Category: MG91 effectors
  REGION 1..530: note = Description: MG91-476 effector
  source 1..530: note = uncultivated organism sequence
MTSQSFVIELPIAVDDAEMRTIVRKLEFARQLHNATLGTAMGQLQQMRQDAAWKEACVMPKGKERAAAFRALDRKYGLTEYDLHSVIAGHREGSGRKAELGINETQKIATRVFQAINRYKLGLGGMPRFKSSKRGLHSIEGKTNKTGLKFRPEKKVLNWCGHDYRVLIDPKDDYIQRALKENERSDKYRKIKYCRLVRKRIRSSDRFFLQVVLEGTAPVKHVYAPVTERAAIDPGPQSIALFSKEFAGKIQVAGSNNFNEAVSRRLLRAMDRSLRRNNPDAYNENGTIKKGAKLVKSKNYQRKVDRLREMHRVAAAERKCRHGQTINLLLSIAGDIRIEKNSWKAFQRGHFGKSLGKSAMSGFIAQLKSKAASAGLKVTEVNPYKLKLSQYDPYTDTYRKKDLSERWQEMKAGSGQYIQRDVLSALLLYCADIEKEIHIPKVAVEQLEGAKQFLTDAGYVVLKSTSSRDQRDPRLASEPKAMTPEMARQKIFRGAGDSHLPTDQELGQIRAGGKVSTWSKETFPLQRGVV

SEQ ID NO: 3285 - protein, 525 aa, unidentified
  REGION 1..525: note = Category: MG91 effectors
  REGION 1..525: note = Description: MG91-477 effector
  source 1..525: note = uncultivated organism sequence
MTSQSFVIELPIALDDAEMRTIVRKLEFARQLHNATLGTAMGQLQQMRQDAAWKEACVMPKGKERAAAFRALDRKYGLTEYDLHSVIARHREGTGRKAELGINETQKIATRVFQAINRYKLGLGGMPRFKSSKRGLHSIEGKTNKTGLKFRPEKKVLNWCGHDYRVLIDPKDDYIQRALKENERSDKYRKIKYCRLVRKRIRSADRFFLQVVLEGTAPVKHVYAPVTERAAIDPGPQSIALFSKAFAGKIQVAGSNNFNEAASRRLLRAMDRSLRRSNPDAYNEDGTIKKGAKLVKSKNYQRKVDRLREMHRVAAAERKCRHGQTINLLLSIAGDIRIEKNSWKAFQRGHFGKSLGKSAMSGFIAQLKSKAASAGLKVKEVNPYKLKLSQYDPYTDTYRKKDLSERWQEMKAGSGQYIQRDILSALLLYCADIEKEIHIPKVAVEQLEGAKQFLTDAGYVVLKSTSSRDQRDLRLAPEPKAMTPEMARQKILRGAGDSHLPTDQALGRIRAGGKVSTWSKETFPL

SEQ ID NO: 3286 - protein, 530 aa, unidentified
  REGION 1..530: note = Category: MG91 effectors
  REGION 1..530: note = Description: MG91-478 effector
  source 1..530: note = uncultivated organism sequence
MTSQSFVIELPIAVDDAEMRTIVRKLEFARQLHNATLGTAMGQLQQMRQDAAWKEACVMPKGKERAAAFRALDRKYGLTEYDLHSVIARHREGSGRKAELGINETQKIATRVFQAINRYKLGLGGMPRFKSSKLGLHSIEGKTNKTGLKFRPEKKVLNWCGHDYRVLIDPKDDYIQRALKENERSDKYRKIKYCRLVRKRIRSSDRFFLQVVLEGTAPVKHVYAPVTERAAIDPGPQSIALFSKAFAGKIQVAGSNNFNEAASRRLLRAMDRSLRRNNPDAYNEDGTINKGAKLAKSKNYQRKVDQLHEMHRVAAAQRKCRHGQTINLLLSIAGDIRIEKNSWKAFQRGHFGKSLGKSAMSGFIAQLKSKAASAGLKVTEVNPYKLKLSQYDPYTDTYRKKDLSERWQEMKAGSGQYIQRDVLSALLLYCADIEKEIHIPKVAVEQLEGAKQLLTDAGYVVLKSTSSRDQRDPRLAPEPKAMTPEMARQKILRGAGDSHLPTDQALGRIRAGGKVSTWSKETFPLQRGVV

SEQ ID NO: 3287 - protein, 511 aa, unidentified
  REGION 1..511: note = Category: MG91 effectors
  REGION 1..511: note = Description: MG91-479 effector
  source 1..511: note = uncultivated organism sequence
MKKKSTNENFIMELPLTVEKFQYNELDKRFELMRRIYNTAQNKLKRQYEYLSSFKAYKDCKTKKEKGDFLESHPFSFKGILNKKGEPLKITFREYDLKSYLSQFTKEKVDSQYTYSDFGINSHMLMHMGMAIWSSWKKVLYDPKAQEVSFKKYGELQSIGVDWKQKKQYGMFLDLGKGIIKLNINGRQKSQARYLTMKIKFGHKERQVWYEGDALKAGEDSIKALTIVRRKIRDKYNYFLQMTIRNNKPQKGRTLGTGRVAIDLGTCKVAVVTKDSVRLIPLAPSISSYSKELRVIQRQMERSRRANNPKKYHKDGTVKKDNRDKWVTSKEYIRLRDIKAELERKQAAVRKQDHIALANELLSLGNEFVIEDNDVQEWAKRKKEEKKREKDGKNLSKAGLGKQIGNHSPATFVTILKNKVESLGGSFTEVDTDNGATDYDFINNEFTRHELEERYITLSDGKRHQRDTLAAFNLYHIDTTQNRVYDRLAMQRHYAWFCEKETEAVKKYKRL

SEQ ID NO: 3288 - protein, 537 aa, unidentified
  REGION 1..537: note = Category: MG91 effectors
  REGION 1..537: note = Description: MG91-480 effector
  source 1..537: note = uncultivated organism sequence
MSTKSFIISLPIITGGQDRRRLRKSFSFGCNLQNAVMGGGWDRVLQMRATAEWQATRAMPKGRERTKAFRDLRVRFRLSEYDFHADVAKHRKASGRGHLLGINECQKLASRAWISVERHLYNGGSPRFISSRRGLHSIEGKTNRTGIIWKADQQCVTVCKHVYRVRVDKRDDWLTRALQDPTDPKKPRKVKYCRIVREMRKGKERFLLQLVAEGTSPLKHAYAGKDLRMAIDPGLGSLTYATEDGTIAKVQIAPSADTDHRAIRRIQRAMERSRRATNPDNYEAVDVVRHGKKKKSFKVKSGRLQWRFSKRYESLRAELAEIFRLSAATRKREHGEVCNWLLGHAGHIIVEDNSYKAFQRGRFGKTIGRHAPAALYAQLTNKAESAGLLVEVVSPKKLKPTQHNLLTGQFVKHELWERRVRLGEDDDERWIDRDAAACLNLLYADIENQTYAPERIREAVLAGVTAWLDAGVVVIQAREGITEREFGRFRRRGIPSLTVQGLRQQGFRGRSDSKSGATPRRKASTVSKPSHFSGEVV

SEQ ID NO: 3289 - protein, 530 aa, unidentified
  REGION 1..530: note = Category: MG91 effectors
  REGION 1..530: note = Description: MG91-481 effector
  source 1..530: note = uncultivated organism sequence
MTSPSFVIELPIAVDDAEMRTIVRKLEFARQLHNATLGTAMGQLQLMRQDAAWKEACVMPKGKERAAAFRALDRKYGLTEYDLHSVIARHREGTGRKAELGINETQKIATRVFQAINRYKLGLGGMPRFKSFKRGLHSIEGKTNKTGLKFKPEQKVLNWCGHDYRVLIDPKDDYIQRALKDNERSDQYRKIKYCRLVRRRIRSADRFFLQVVLEGTAPVKHVYAPVTERAAIDPGPQSIALFSKEFAGKIQVAGSNNFNEAVSRRLLRAMDRSLRRNNPDAYNENGTIKKGAKLVKSKNYQRKVDRLREMHRVAAAERKCRHGQTINLLLSIAGDIRIEKNSWKAFQRGHFGKSLGKSAMSGFIAQLKSKAASAGLKVTEVNPYKLRLSQYDPYTDTYRKKDLSERWQEMKAGSGLYIQRDVLSALLLYCANIEKEIHIPKVAVEQLEGAKQFLTDAGYVVLKSTSSRDQRDPRLASEPKAMTPEMARQKIFRGAGDSHLPTDQELGQIRAGGKVSTWSKETFPLQRGVV

SEQ ID NO: 3290 - protein, 1352 aa, unidentified
  REGION 1..1352: note = Category: MG91 effectors
  REGION 1..1352: note = Description: MG91-482 effector
  source 1..1352: note = uncultivated organism sequence
MTAFKYYLGLDMGTNSVGWAATDPEYRLLKAKGKDLWGIREFNEASGAVERRTHRISRRRRQREQVRIGILKDYFHDAICEVDPSFFQRLENSKYHEEDKDVEVRYKNNIFNDSNYTDKDYFNEYPTIYHLRNELISSTEKHDVRLVFLALLNMFKHRGHFLNAGLGENNGESNIDNVYFELTELLSELTEYHLSQDIDCKQIEAILSRRDMSRTHKAEELAGVLHVDLKNKPYKELIRGLCGLKFNACVVFPDVQSEEVTKLDICLSESTFDEKSDEIANIIGEDYFEIIMAMKEMFDIGSLASIMKGHNYLSQARVASYTKHKEDLKLLKEVIKKYCGKKEYDKFFNSDADGSYASYVGSYNSKNKERRVGNKRTSEELYKEIKKLLKDAQKEDENVQKILTSIENETFLPKQLTASNGVIPNQVHAREMKKILSNAENYLPFLTEKDETGLSVSERILKLFTFQIPYYVGPTSENSGKNGGNGWVVRREDGQVLPWNIDEKIDMKATSEAFISRMVRRCTYISGEQVLPKASLEYQSYCVLNEINNIKIDGERISVELKQDIYKAVFQKGKKVTKKQLCKYLHTRGIIETEEQVTGVDVSINNALTTYGKFKPIFGEDISKDSVQKMIEDIVFWCTVYGDSKKFLKDRIEEKYGNKLSEEQIKRILGFKFKDWGNLSKKFLELNGADTSTGESISIIRALWNNNLNLMELINSSLYNYKECLAEYQNTMLKTLSEIEAEDLNEYYFSAPVRRMIWQTILVIKELVKVLGCEPERIFVEMTRRPDEHKTRTSSRRNKFEELYKKVKDETTDWMQVIANAEEDGKIRSKKMYLYLTQKGRCMYTGKHIELDDLFDNNLYDIDHIYPRHFVKDDNIDNNLVLVCKEKNAHKSDHYPIEEEIFLSQKKMWLELRKSGFITEEKYNRLMDRNPFSDEQKAGFIARQLVETSQGTKGVANILRQLLPGSKIVYAKASNVSEFRCTRDDIPKSRLVNDFHHAHDAYLNIVVGNVYYVKFTQNPLNFIKKDYDKYKEDYNLSKMFDWDVKRNGEVAWIAQRKDGAAGTITTVKRMLSRNTPLMTRYSFDGKGGLTNETLYSAKKAKGEGYIPFKSSDDKMQDVTKYGGFTSVTGAYFFLVEHTEKKKRIRTIESVPVYLAQKIEQNPDELKKYCEEILGLIDADIRLKKIKIGSLIKRNGYFCYITGKTGNRLIVRNAVNLCLKNEWIKYISKLEKVKEKDAVDKIITKEKNEVLYSELIQKFKHGIFSKRPNPVGDKLEKDSEKFNNLSIKDQCAVLCQVLRMAAILGSECDMTLLGDSPNCGKMLISKKIGDEEIYLINQSVTGLYEKKINLHTV

SEQ ID NO: 3291 - protein, 530 aa, unidentified
  REGION 1..530: note = Category: MG91 effectors
  REGION 1..530: note = Description: MG91-483 effector
  source 1..530: note = uncultivated organism sequence
MTSQSFVIELPIAVDDAEMRTIVRKLEFARQLHNATLGTAMGQLQQMRQDAAWKEACVMPKGKERAAAFRALDRKYGLTEYDLHSVIARHREGSGRKAELGINETQKIATRVFQAINRYKLGLGGMPRFKSSKRGLHSIEGKTNKTGLKFRPEKKVLNWCGHDYRVLIDPKDDYIQRALKENERSDKYRKIKYCRLVRKRIRSSDRFFLQVVLEGTAPVKHVYAPVTERAAIDPGPQSIALFSKAFAGKIQVAGSNNFNEAASRRLLRAMDRSLRRNNPDAYNEDGTINKGVKLAKSKNYQRKVDQLHEMHRVAAVQRKCRHGQTINLLLSIAGDIRIEKNSWKAFQRGHFGKSLGKSAMSGFIAQLKSKAASAGLKVTEVNPYKLKLSQYDPYTDTYRKKDLSERWQEMKAGSGLYIQRDILSALLLYCADIEKEIHIPKVAVEQLEGAKQFLTDAGYVVLKSTSSRDQRDPRLASEPKAMTPEMARQKILRGAGDSHLPTDQELGRIRAGGKVSTWSKETFPLQRGVV

SEQ ID NO: 3292 - protein, 525 aa, unidentified
  REGION 1..525: note = Category: MG91 effectors
  REGION 1..525: note = Description: MG91-484 effector
  source 1..525: note = uncultivated organism sequence
MTSQSFVIELPIAVDDAEMRTIVRKLEFARQLHNATLGTAMGQLQQMRQDAAWKEACVMPKGKERAAAFRALDRKYGLTEYDLHSVIARHREGSGRKAELGINETQKIATRVFQAINRYKLGLGGMPRFKSSKRGLHSIEGKTNKTGLKFRPEKKVLNWCGHDYRVLIDPKDDYIQRALKENERSDKYRKIKYCRLVRKRIRSADRFFLQVVLEGTAPVKHVYAPVTERAAIDPGPQSIALFSKAFAGKIQVAGSSNFNEAASRRLLRAMDRSLRRNNPDAYNEDGTIKKGAKLVKSKNYQRKVDRLREMHRVAAAERKCRHGQTINLLLSIAGDIRIEKNSWKAFQRGHFGKSLGKSAMSGFIAQLKSKAASAGLKVTEVNPYKLKLSQYDPYTDTYRKKDLSERWQEMKAGSGQYIQRDILSALLLYCADIEKEIHIPKVAVEQLEGAKQFLTDAEYVVLKSTSSRDQRDLRLAPEPKAMTPEMARQKILRGAGDSHLPTDQALGRIRAGGKVSTWSKETFPL

SEQ ID NO: 3293 - protein, 530 aa, unidentified
  REGION 1..530: note = Category: MG91 effectors
  REGION 1..530: note = Description: MG91-485 effector
  source 1..530: note = uncultivated organism sequence
MPSQSFVIELPIAVDDAEMRTIVRKLEFARQLHNATLGTAIGQLQQMRQDTAWKQACAMPKGKERTAAFRALDRKYGLTEYDLHSVIARHREGSGRKAELGINETQKIATRVFQAINRYKLGLGGMPRFKSSKRGLHSIEGKTNKTGLKFRPEKKVLNWCGHDYRVLIDPKDDYIQRALKENERSDKYRKIKYCRLVRKRIRSSDRFFLQVVLEGTAPVKHVYAPVTERAAIDPGPQSIALFSKEFAGKIQVAGSNNFNEAASRRLLRAMDRSLRRNNPDAYNENGTIKKGAKLVKSKNYQRKVDRLREMHRVAAAERKCRHGQTINLLLSIAGDIRIEKNSWKAFQRGHFGKSLGKSAMSGFIAQLKSKAASAGLKVTEVNPYKLRLSQYDPYTDTYRKKDLSERWQEMKAGSGLYIQRDVLSALLLYCADIEKEIHIPKVAVEQLEGAKQFLTDAGYVVLKSTSSRDQRDPRLASEPKAMTPEMARQKILRGAGDSHLPTDQELGQIRAGGKVSTWSKETFPLQRGVV

SEQ ID NO: 3294 - protein, 537 aa, unidentified
  REGION 1..537: note = Category: MG91 effectors
  REGION 1..537: note = Description: MG91-486 effector
  source 1..537: note = uncultivated organism sequence
MSTKSFIISLPIITGDQDRRRLQKSFSFGCNLQNAVMGGGWDRVLKMRATAEWQTARAMPKSSERTKAFRDLRVHFRLSEYDFHADVAKHRKASGRGHLLGINEGQKLASRAWISVERHLYNGGSPRFISSRRGLHSIEGKTNRTGIIWKADQQCVTVCKHVYRVRVDKRDDWLTRALQDPTDPTRPRKVKYCRIVREMRKGKERFLLQLVAEGTSPLKHAYAGKDLRMAIDPGLGSLTYATEDGTIAKVQIAPSADTDHRAVRKLQRAMERSRQATNPDNYETVEVVRHGKKHKSLKVKSGRLQWRFSKRYESLRAELAEIFRLSAATRKREHGEVCNWLLGHAGHIIVEDNSYKAFQKGHFGKSIGRHAPAAFYTQLTSKAESAGLQVTVVSPRKLKPSQHNLLTDTFVKHELWERRVRLGNDDDDRWIDRDAAACLNLLYADLEKQTYVPERIREAVLAGVTAWLDAGVVVIQAREGITEREFGRFRRRGIPSLTVQGLRQQGFRGRSDSKSGATPRRKASTVSKPSHLSGEVV

SEQ ID NO: 3295 - protein, 524 aa, unidentified
  REGION 1..524: note = Category: MG91 effectors
  REGION 1..524: note = Description: MG91-487 effector
  source 1..524: note = uncultivated organism sequence
MTSQTFILELPIKADDSQSRTIAKKFEYGRMLYNATLGSGLGRLTQMRQDPEWRRACEMSKGKERNELFRRLNRKYRLTEYDFHADIARHREGTKRKSELGINEAQKLATQAFSAVSRYMYKQGGRPRFKSFKRGLHSLEGKTNKTGLKFRPEKMLLDWCRKSYQVMLDSDDAFILDALYADKERTHFKRIKYNRIVCRNIKGVKRFYLQVVLEGTPPVKHAYAPATERMAIDPGPKSFAVFCPRVQAKVQVAPGAKVNEKAIRRIQRSMDRSLRASNPKAFDEKGRIKSGVGLTYSKGYQARVDKLREAHRRAAGTRKCEHGELANLLLECAGNIRIEKNSWEAFKRSHFGRSINNSAASGFIQRLKSKAERAGLTVEEVSPYRLKPSQYDPYKDEFMKKALGERWMYLGDETTVIQRDIMSAILIYFADLKNQTHNPEVVKAALEGLKRGLTDAGYVKQLKLPRSSGSQDPLFAPEPKALTTEELRSKCFRAGSDRHSSTLNGTDGKAVGWSETFPLQRGVV

SEQ ID NO: 3296 - protein, 525 aa, unidentified
  REGION 1..525: note = Category: MG91 effectors
  REGION 1..525: note = Description: MG91-488 effector
  source 1..525: note = uncultivated organism sequence
MTSQSFVIELPIAVDDAEMRTIVRKLEFARQLHNATLGTAMGQLQQMRQDAAWKEACVMPKGKERAAAFRALDRKYGLTEYDLHSVIARHREGSGRKAELGINEAQKIATRVFQAINRYKLGLGGMPRFKSSKRGLHSIEGKTNKTGLKFRPEKKVLNWCGHDYRVLIDPKDDYIQRALKENERSDKYRKIKYCRLVRKRIRSADRFFLQVVLEGTAPVKHVYAPVTERAAIDPGPQSIALFSKAFAGKIQVAGPNNFNEAASRRLLRAMDRSLKRNNPDAYNEDGTIKKGAKLVKSKNYQRKVDRLREMHRVSAAERRCLHGQTINLLLSIAGDIRIEKNSWKAFQRGHFGKSLGKSAMSGFIAQLKSKAESAGLKVTEVNPYKLKLSQYDPYTDTYRKKALSERWQEMKAGSGQYIQRDVLSALLLYCADIEKEIHIPKAAVEQLEGAKQLLTDAGYVVLKSTSSRDQRDPRLAPEPKAMTPEMARQKILRGAGDSHLPTDQALGRIRAGEKVSTWSKETFPL

SEQ ID NO: 3297 - protein, 529 aa, unidentified
  REGION 1..529: note = Category: MG91 effectors
  REGION 1..529: note = Description: MG91-489 effector
  source 1..529: note = uncultivated organism sequence
MSQSYILSFELTLPQRIYPYLDKLFNVFKWEVRRTVGEIWNEDFFKRFKGRGSASAILKEILKKPPNIPSRVHRNILELSGEIVRSHIERKRIYDYLMEKPCRVLFDEDRIADELNASPLFVLNVQRQVRKILRKEKDKKSYFQVVKPSFNGEVVIFSADDSVENGQFKKLRFSRRYIEFEIKVPDGNSWKWIKVRKLISDRLKKFLTEAKRTCAPLIKKVYLKSGLSIYRLVIPLEFETRFSEGSLKVFSLDLSPSEKRLGVGVIVSPEGHSRPIFFNAEKMVKKLERILKEISNLEKKIDNIADEIHITGNREHKVRLEKRLKHLFAEQKLKWRKFKELRKQILEVFTKLILEYARAYDYSFIAVERLKFSSLPDWKNRRMRRLFSQWFYARFIERLRQKALRYGLRVLLINPYRTSRVCHKCGGEGKLEKLEFKCQCGTYDRDYNASVNIGKRALEKLVSGAKSEPYRGEDIPARFPFPQGTIHLKGKALLSILPLTLLLSYLRLVETSYLKLSRLSRYLQTDKYG

SEQ ID NO: 3298 - protein, 530 aa, unidentified
  REGION 1..530: note = Category: MG91 effectors
  REGION 1..530: note = Description: MG91-490 effector
  source 1..530: note = uncultivated organism sequence
MPSQSFVIELPIAVDDAEMRTIVRKLEFARQLHNATLGTAMGQLQQMRQDAAWKEACVMPKGKERAAAFRALDRKYGLTEYDLHSVIARHREGSGRKAELGINETQKIATRVFQAINRYKLGLGGMPRFKSSKRGLHSIEGKTNKTGLKFRPEKKVLNWCGHDYRVLIDPKDDYIQRALKENERSDKYRKIKYCRLVRKRIRSSDRFFLQVVLEGTAPVKHVYAPVTERAAIDPGPQSIALFSKEFAGKIQVAGSNNFNEAASRRLLRAMDRSLRRNNLDAYNENGTIKKGAKLVKSKNYQRKVDRLREMHRVAAAERKCRHGQTINLLLSIAGDIRIEKNSWKAFQRGHFGKSLGKSAMSGFIAQLKSKAASAGLKVTEVNPYKLRLSQYDPYTDTYRKKDLSERWQEMKAGSGLYIQRDVLSALLLYCADIEKEIHIPKVAVEQLEGAKQFLTDAGYVVLKSTSSRDQRDPRLASEPKAMTPEMARQKILRGAGDSHLPTDQELGQIRAGGKVSTWSKETFPLQRGVV

SEQ ID NO: 3299 - protein, 530 aa, unidentified
  REGION 1..530: note = Category: MG91 effectors
  REGION 1..530: note = Description: MG91-491 effector
  source 1..530: note = uncultivated organism sequence
MPSQSFVIELPIAVDDAEMRTIVRKLEFARQLHNATLGTAIGQLQQMRQDTAWKQACAMPKGKERTAAFRALDRKYGLTEYDLHSVIARHREGSGRKAELGINETQKIATRVFQAINRYKLGLGGMPRFKSSKRGLHSIEGKTNKTELKFRPEKKVLNWCGHDYRVLIDPKDDYIQRALKENERSDKYRKIKYCRLVRKRIRSSDRFFLQVVLEGTAPVKHVYAPVTERAAIDPGPQSIALFSKEFAGKIQVAGSNNFNEAASRRLLRAMDRSLRRNNPDAYNENGTIKKGAKLVKSKNYQRKVDRLREMHRVAAAERKCRHGQTINLLLSIAGDIRIEKNSWKAFQRGHFGKSLGKSAMSGFIAQLKSKAASAGLKVTEVNPYKLRLSQYDPYTDTYRKKDLSERWQEMKAGSGLYIQRDVLSALLLYCADIEKEIHIPKVAVEQLEGAKQFLTDAGYVVLKSTSSRDQRDPRLASEPKAMTPEMARQKILRGAGDSHLPTDQELGQIRAGGKVSTWSKETFPLQRGVV

SEQ ID NO: 3300 - protein, 530 aa, unidentified
  REGION 1..530: note = Category: MG91 effectors
  REGION 1..530: note = Description: MG91-492 effector
  source 1..530: note = uncultivated organism sequence
MPSQSFVIELPIAVDDAEMRTIVRKLEFARQLHNATLGTAMGQLQQMRQDAAWKEACVMPKGKERAAAFRALDRKYGLTEYDLHSVIARHREGSGRKAELGINETQKIATRVFQAINRYKLGLGGMPRFKSSKRGLHSIEGKTNKTGLKFRPEKKVLNWCGHDYRVLIDPKDDYIQRALKENERSDKYRKIKYCRLVRKRIRSSDRFFLQVVLEGTAPVKHVYAPVTKRAAIDPGPQSIALFSKEFAGKIQVAGSNNFNEAASRRLLRAMDRSLRRNNPDAYNENGTIKKGAKLVKSKNYQRKVDRLREMHRVAAAERKCRHGQTINLLLSIAGDIRIEKNSWKAFQRGHFGKSLGKSAMSGFIAQLKSKAASAGLKITEVNPYKLRLSQYDPYTDTYRKKDLSERWQEMKAGSGLYIQRDVLSALLLYCADIEKEIHIPKVAVEQLEGAKQFLTDAGYVVLKSTSSRDQRDPRLASEPKAMTPEMARQKILRGAGDSHLPTDQELGQIRAGGKVSTWSKETFPLQRGVV

SEQ ID NO: 3301 - protein, 530 aa, unidentified
  REGION 1..530: note = Category: MG91 effectors
  REGION 1..530: note = Description: MG91-493 effector
  source 1..530: note = uncultivated organism sequence
MTSQSFVIELPIAVDDAEMRTIVRKLEFARQLHNATLGTAMGQLQQMRQDAAWKEACVMPKGKERAAAFRALDRKYGLTEYDLHSVIARHREGSGRKAELGINETQKIATRVFQAINRYKLGLGGMPRFKSSKRGLHSIEGKTNKTGLKFRPEKKVLNWCGHDYRVLIDPKDDYIQRALKENERSDKYRKIKYCRLVRKRIRSADRFFLQVVLEGTAPVKHVYAPVTERAAIDPGPQSIALFSKAFAGKIQVAGPNNFNEAASRRLLRAMDRSLKRNNPDAYNEDGTIKKGAKLVKSKNYQRKVDRLREMHRVSAAERRCLHGQTINLLLSIAGDIRIEKNSWKAFQRGHFGKSLGKSAMSGFIAQLKSKAESAGLKVTEVNPYKLKLSQYDPYTDTYRKKALSERWQEMKAGSGQYIQRDILSALLLYCADIEEEIHIPKVAVEQLEGAKQFLTDAGYVVLKSTSSRDQRDPRLAPEPKAMTPEMARQKILRGAGDSHLPTDQALGRIRAGGKVSTWSKETFPLQRGVV

SEQ ID NO: 3302 - protein, 532 aa, unidentified
  REGION 1..532: note = Category: MG91 effectors
  REGION 1..532: note = Description: MG91-494 effector
  source 1..532: note = uncultivated organism sequence
MSTKSFIITLPIITGSEERRWLRKSFSFGCNLQNAVMGGGWDRVQQMRATPEWQAARVMPKGKERTQALRDLRIRFRLSEYDFHADVAQHRKASGRGHLLGINECQKIASRAWISVERHIYKGGSPRFISSKRGLHSVEGKTNKTGIIWKAEKSVFKFAGHTYRVRINKHDDWLTRALQDPTDPAKPRKVKYCRIVRNVRKGKECFDLQLIAEGTSPLKHAYAGKDLRMAIDPGLGSLTYATEDGKIAKVQIAPNADTDHRAVRKIQRAMERSRQATNPENYETVDVVRHGKKRKSLKVKSGRLQWRFSKHYEKLRAELAEIHRLAAATRKREHGEVCNWLLGHAGTIIVEDNSFKAFQRGRFGKSIGRYAPAAFYTQLTSKAESAGLQVKVVSPRKLKPTQHNLLTGRFVKHELWERRVQLGDRTGVCWIDRDAAACVNLLYADLDQQTYDPKRIREAVLAGVTAWLDAGVVVIQARERITEREFRRFRRRGIPSLAVQGLRQKGFRGRSDSKSGATPEEKSLGQIETFPL

SEQ ID NO: 3303 - protein, 530 aa, unidentified
  REGION 1..530: note = Category: MG91 effectors
  REGION 1..530: note = Description: MG91-495 effector
  source 1..530: note = uncultivated organism sequence
MTSLSFVIELPIAVDDAEMRTIVRKLEFARQLHNATLGTAMGQLQQMRQDAAWKEACVMPKGKERAAAFRALDRKYGLTEYDLHSVIARHREGSGRKAELGINETQKIATRVFQAIKRYKLGLGGMPRFKSSKRGLHSIEGKTNKTGLKFRPEKKVLNWCGHDYRVLINPKDDYIQRALKENERSDKYRKIKYCRLVRKRIRSADRFFLQVVLEGTAPVKHVYAPVTERAAIDPGPQSIALFSKAFAGKIQVAGSNNFNEAASRRLLRAMDRSLRRNNPDAYNEDGTIKKGAKLVKSKNYQRKVDRLREMHRVAAAERKCRHGQTINLLLSIAGDIRIEKNSWKAFQRGHFGKSLGKSAMSGFIAQLKSKAASAGLKVTEVNPYKLKLSQYDPYTDTYRKKDLSERWQEMKAGSGQYIQRDVLPALLLYCADIEKEIHIPKVAVEQLEGAKQLLTDAGYVVLKSTSSRDQRDPRLAPEPKAMTPEMARQKILRGAGDSHLPTDQALGRIRAGGKVSTWSKETFPLQRGVV

SEQ ID NO: 3304 - protein, 526 aa, unidentified
  REGION 1..526: note = Category: MG91 effectors
  REGION 1..526: note = Description: MG91-496 effector
  source 1..526: note = uncultivated organism sequence
MEEVFVLELPLQVEKYQADILNKRYEQLRQLYNYVQGKLLRQYRYFEQMVEFQACKTIREKRVFFRSHPFNINGKLAGNKELPEITFDEYGINGFVEKMAQKSVGTNMTYADLGFTTNILDHLSASIWSAWEKKLYDYRAKRITFKKYGELDSFSSRRKVVCGKVYFSGVELHLDTMELAIKINGKVGKDAKFITLPILHNPKHTDYEMWALKGGLDSIKVVKVVRRLVRGQYKYYLQLSIEGEKPQKGRTLGKGNVGIDIGPTTIAVSGENIASIDKLASKCDNIQEEITRLARKIDRSRRANNPENFNEDGTIKRGVRLVWNDSKRYKALRKEMAELQRRQAAIRKQQHIDRANVLLKEGDTFIVENNKISGWTRKAKETKVNEKTGKIQKKKRFGKSVANNAPAMFVTILENKVKSLGGEVVKVDTQNAASQYDFTNNSFEKHELKERSVTLSNGDTHQRDMLAAFNLQHLKYDAPEKKQYDTEAMAQHYDHFCELEKAEILRYKNKEKKDDRSTIGAGDLLD

SEQ ID NO: 3305 - protein, 537 aa, unidentified
  REGION 1..537: note = Category: MG91 effectors
  REGION 1..537: note = Description: MG91-497 effector
  source 1..537: note = uncultivated organism sequence
MSTKSFIISLPIITGDQDRRRLRKSFSFGCNLQNAVMGGGWDRVLKMRATAEWQTARAMPKSSERTKAFRDLRVRFRLSEYDFHADVAMHRKASGRGHLLGINECQKLASRAWISVERHLYNGGSPRFISSRRGLHSIEGKTNRTGIIWKADQQCVTVCKHVYRVRVDKRDDWLTRALQDPTDPTKPRKVKYCRIVREMRKGKERFLLQLVAEGTSPLKHAYAGKDLRMAIDPGLGSLTYATEDGTIAKVQIAPSADTDHRAVRKLQRAMERSRQATNPDNYETVEVVRHGKKHKSLKVKSGRLQWRFSKRYEKLRSELAEMLRLSAATRKREHGEVCNWLLGHAGHIIVEDNSYKAFQRGRFGKTIGRHAPAALYAQLTNKAESAGLLVEVVSPKKLKPSQHNLLTDTFVKHELWERRVRLGNDDDDRWIDRDAAACLNLLYADLEKQTYAPERIREAVLAGVTAWLDAGVVVIQAREGITEREFGRFRRRGIPSLTVQGLRQQGFRGRSDSKSGVTPRRKASTVSKPSHFSGEVV

SEQ ID NO: 3306 - protein, 532 aa, unidentified
  REGION 1..532: note = Category: MG91 effectors
  REGION 1..532: note = Description: MG91-498 effector
  source 1..532: note = uncultivated organism sequence
MSTKSFIITLPIITGSEERRWLRKSFSFGCNLQNAVMGGGWDRVQQMRATPEWQAARVMPKGKERTQAFRDLRIRFRLSEYDFHADVAQHRKASGRGHLLGINECQKIASRAWISVERHIYKGGSPRFISSKRGLHSVEGKTNKTGIIWKAEKSVFKFAGHTYRVRINKHDDWLTRALQDPTDPAKPRKVKYCRIVRNVRKGKECFDLQLIAEGTSPLKHAYAGKDLRMAIDPSLGSLTYATEDGKIAKVQIAPNADTDHRAVRRIQRAMERSRQATNPENYETVDVVRHGKKRKSLKVKSGRLQWRFSKHYEKLRAELAETHRLAAATRKREHGEVCNWLLGHAGTIIVEDNSFKAFQRGRFGKSIGRYAPAAFYTQLTSKAESAGLQVKVVSPRKLKPTQHNLLTGRVVKHELWERRVQLGDRTSVCWIDRDAAACVNLLYADLDQQTYDPKRIREAVLAGVTAWLDAGVVVIQAREGITEREFRRFRRRGIPSLAVQGLRQKGFRGRSDSKSGATPEEKSLGQIETFPL

SEQ ID NO: 3307 - protein, 537 aa, unidentified
  REGION 1..537: note = Category: MG91 effectors
  REGION 1..537: note = Description: MG91-499 effector
  source 1..537: note = uncultivated organism sequence
MSTKSFIISLPIITGDQDRRRLCKSFSFGCNLQNAVMGDGWDRVLKMRATPKWQAARAMPNGSERTKAFRDLRVRFRLSEYDFHADVAKHRKASGRIHLLDINECQELASRAWISVERHLYNGGSPRFISSRRGLHSIEWKTNRTGIIWKADQQCVTVSKHVYRIRVDKHDDWLTRALQDPTDPTKPRRVKYCRIVREMRKGKERFLLQLVAEGTSPLKHAYAGKDLRMAIDPGLGSLTYATEDGTIAKVQIAPSADTDQRAVRKLQRAMERSRQATNPDNYETVGVVRHGKKRKSLKVKAGRLQWRFSKRYEKLRSELAEMLRLSVATRKREHGEVCNWLLGHVGHIIVEDNSYKAFQRGRFGKTIGRHAPAALYAQLASKAECAGLLVEVVSPKKVKPTQYNLLTGQFVKHELWERRVRLGEDDDDRWIDRDAAACLNLLYADLEKQIYAPERIREAVPAGVTAWLDAGVVVIQAREGITEREFGRFRRRGIPSSTVQGLCQQGFRGRSDSKSGATPRRKASTVSKPSHFSGEVV

SEQ ID NO: 3308 - protein, 524 aa, unidentified
  REGION 1..524: note = Category: MG91 effectors
  REGION 1..524: note = Description: MG91-500 effector
  source 1..524: note = uncultivated organism sequence
MTSPSFILELPIKVNDSESRMILRKFEFARQLHNATLGSALGQLQQMRQDPQWKKACNLPKGKERSELFRNLDRQYRLTEYDLHTVIAKHRERSGRKDQLGINETQKIATRVYQSIRRYQLGLGGRPRFKSISRGLHSIEGKTNVTGLKFNLQKSVLSWCKHDYRVIIDAKDDYIQRALQKEDGTGYKKIKYCRLVRKTIKNRERFFLQVLLEGTAPVKHIYAPDSERLSIDPGPQAIAVFSEQFAGKIQIAPTAKVNEAVIRRMQRSMDRSLRQNNEEAYESNGTLKKGVKLKQTKSYKMRVAQLSDYHRRVAATRRCEHGQLANLLLSLAGDIRIEKNHWKAFQRGHFGKSLGKSGASSFIERLKSKAESAGLKVSEVKPYTLKLSQYDPYTETYRKKALSERWHQLGSSSEWIQRDVLSALLLQCADIEKEKHIPTKIIETLEGAKQLLRDAGYIVDKPSSNGDHCDRPFASEPKAQTPEEVRLEIFCGVGDSRLPLLLRNGSRQKANEKAHVRSKETFSL

SEQ ID NO: 3309 - protein, 639 aa, unidentified
  REGION 1..639: note = Category: MG91 effectors
  REGION 1..639: note = Description: MG91-501 effector
  source 1..639: note = uncultivated organism sequence
MLTKELRQEALKKGFHYPKVEKSVEFYRTKNLMIYDFVNENRISMLRVCIAEKKAGIYDTFTKTWADCLLSSFLGKAGISVSELLAFALSAEAKKRLSSGHDNFDYLALYKIDQQISYAKNWEKRHPADERKKEISQIMAGTNKRLSAGFIKFNLDLFGDCKRIMYSKSEKAVYCPECESISRISSPPKKGSLYRCPVCCFTAKVSQAENPLTEVHWSCIVQPAGKRSIIRYFCNDFSLQFGKCKIASEEKFRTILEADGSRIELMQTGNGWEDYKEKRYGLYYPSKRDVPYDMFLYGNVKAILKIPVYEHSMLDVWVKQHKNKKNELYTVYLIENYISQYAKNEIFEKLLKFGLNHIAHEAAFHNYNRTFNFNGNKIEDFLNIKMASLKQLRRIINDPFERDIIAMRYLDKNNLYLKDEELKKFLSLNVSNDMKEKIVRFCKFKKVTFYKVNNYVTENANADWSSYFDYIGWTEELEYKKSDSVYYPKKFFKTHDRVFKELEEKKDAIQRKKDKEISKKIAGLWEQRMQIPQYHYENNDLFVMMPHGTSDLKKEGRSLNHCVADYKEFVAEEKTQIFFISKKAAPQKSFYTLEIKNHEIEQCHGRNNVDMTEEIRSFAYGYLKQLNTLNEKAAVKAVA

SEQ ID NO: 3310 - protein, 532 aa, unidentified
  REGION 1..532: note = Category: MG91 effectors
  REGION 1..532: note = Description: MG91-502 effector
  source 1..532: note = uncultivated organism sequence
MSTKSFIINLPIITGDQDRRRLRKSFSFGCNLQNAVMGGGWDRVLWMRATPEWQAARVMPKGSERTKAFRDLRVQFRLSEYDFHADVAKHRKASGRSHLLGINESQKLASRAWISVERHLYNSGSPRFISSRRGLHSIEGKTNRTGIIWKADQQCVTVCKRVYRVRVDKRDDWLTRALQDPTDPKKPRKVKYCRIVREMRKGKERFLLQLVAEGTSPLKHAYAGKDQRMAIDPGLGSLTYATEDGKIAKVQIAPNADTDHRAVRRIQRAMERSRQATNPDNYETVDVVRHGKKRQSLKVKSGRLEWRFSKRYEKLRAELAQPHRLAAATRKREHGEVCNWLLGHAGTIIVEDNSFKAFQRGQFGKSIGRHAPAAFYTQLTSKAESAGLQVKVVSPKKLKPTQHNLLTGRFVKHELWERRVQLGDRTDVCWIDRDAAACVNLLYADLDQQIYDPKRIREAVLAGVTAWLDAGVVVIQAREGITEREFRRFRRRGIPSLAVQGLRQKGFRGRSDSKSGAIPEAKSLGYIETFPL

SEQ ID NO: 3311 - protein, 492 aa, unidentified
  REGION 1..492: note = Category: MG91 effectors
  REGION 1..492: note = Description: MG91-503 effector
  source 1..492: note = uncultivated organism sequence
MRATPKWQAARAMPNGSERTKAFRDLRVRFRLSEYDFHADVAKHRKASGRIHLLDINECQELASRAWISVERHLYNGGSPRFISSRRGLHSIEWKTNRTGIIWKADQQQCVTVSKHVYRIRVDKHDDWLTRALQDPTDPTKPRRVKYCRIVREMRKGKERFLLQLVAEGTSPLKHAYAGKDLRMAIDPGLGSLTYATEDGTIAKVQIAPSADTDHRAVRKLQRAMERSRQATNPDNYETVEVVRHGKKHKSLKVKSGRLQWRFSKRYEKLRSELAEMLRLSVATRKREHGEVCNWLLGHVGHIIVENNSYKAFQRGRFGKTIGRHAPAALYAQLASKAECAGLLVEVVSPKKVKPTQYNLLTGQFVKHELWERRVRLGEDDDDRWIDRDAAACLNLLYADLEKQIYAPERIREAVPAGVTAWLDAGVVVIQAREGITEREFGRFRRRGIPSSTVQGLRQQGFRGRSDSKSGATPRRKASTVSKPSHFSGEVV

SEQ ID NO: 3312 - protein, 530 aa, unidentified
  REGION 1..530: note = Category: MG91 effectors
  REGION 1..530: note = Description: MG91-504 effector
  source 1..530: note = uncultivated organism sequence
MTSQSFVIELPIAVDDAEMRTIVRKLEFARQLHNATLGTAMGQLQQMRQDAAWKEACVMPKGKERAAAFRALDRKYGLTEYDLHSVIARHREGSGRKAELGINETQKIATRVFQAINRYKLGLGGMPRFKSFKRGLHSIEGKTNKTGLKFKPEQTVLNWCGHDYRVLIDPKDDYVQRALKENERSDQYRKIKYCRLVRKRIRSSDRFFLQVVLEGTAPVKHVYAPVTERAAIDPGPQSIALFSKAFAGKIQVAGSNNFNEAASRCLLRAMDRSLRRNNPDAYNENGTIKKGAKLVKSKNYQRKVDRLREMHRVAAAERKCRHGQTINLLLSIAGDIRIEKNSWKAFQKGHFGKSLGKSAMSGFIAQLKSKAASAGLKVTEVNPYKLKLSQYDPYTDTYRKKDLSERWQEMKAGSGQYIQRDVLSALLLYCADIEKEIHIPKAAVEQLEGAKQLLTDAGYVVLKSTSSRDQRDPRLAPEPKAMTPEMARQKILRGAGDSHLPTDQALGRIRAGGKVSTWSKETFPLQRGVV

SEQ ID NO: 3313 - protein, 634 aa, unidentified
  REGION 1..634: note = Category: MG91 effectors
  REGION 1..634: note = Description: MG91-505 effector
  source 1..634: note = uncultivated organism sequence
MLTKDLKQEALKRGFLHSGVNDSIEAYRTRNLAIYDFVCEGSAVVRVCISKQHAGIYDVLNNIWKDCTLENYLEDPNQFANYMLSERAKKLLKTDSLFFDSKASFAIDVQIRKAKNWKKINQKENREKEIKKIMAGTNKPVPSGFKIFSERLLCSAKRIMYSAKEKSLYCPECGNTFQLPGVPKKGSVHTCPACGYRAKVSCVQYQLNDIHWSCIVQAAGKRSVIRYFCNELLLEYGKCSTIFYEKYRTIIEEDGSMVPLMQTSDGWNDYKAKNYSFFYTVPKREEPNDMYLYGTVDALMKMPVLKNSMLDVWVKQHIGADKKLCSEYLVENYIKIYAKTTIYEKLLKCGLNKIAHEAAFYYDSSFHREEKKVDKFLNLTKENLNRLREFIPDPSGSNVSAMRYLEKYNVYLKDDELKTFLRLEVSDNMKEQIIKFCKCKKVTLYKINKYVTENANADWSSYFDYIGWTEELDYKKSDSVYYPKKFFKTHDRVFKELEEKKDAIQRKKDKEISKKIADLWEQRMQIPQYHYENNDLFVMMPHDTSDLKKEGRSLNHCVAGYKEFVAEEKTQIFFIRKKADPQKSFYTLEIKNHDIEQCHGKNNVNMTEEIRTFAYGFLNQLNTIKEKPAVRAAA

SEQ ID NO: 3314 - protein, 530 aa, unidentified
  REGION 1..530: note = Category: MG91 effectors
  REGION 1..530: note = Description: MG91-506 effector
  source 1..530: note = uncultivated organism sequence
MTSQSFVIELPIAVDDAEMRTIVRKLEFARQLHNATLGTAIGQLQQMRQDTAWKQACAMPKGKERTAAFRALDRKYGLTEYDLHSVIARHREGSGRKAELGINETQKIATRVFQAINRYKLGLGGMPRFKSSKRGLHSIEGKTNKTGLKFRQEKKVLNWCGHDYRVLIDPKDNYVQRALKENERSDQYRKIKYCRLVRKRIRSADRFFLQVVIEGTAPVKHVYAPVTERAAIDPGPQSITLFSKAFAGKIQVAGSNNFNEAASRRLLRAMDRSLRRNNPDAYNEDGTINKGAKLAKSKNYQRKVDQLHEMHRVAAAQRKCRHGQTINLLLSIAGDIRIEKNSWKAFQRGHFGKSLGKSAMSGFIAQLKSKAASAGLKVTEVNPYKLKLSQYDPYTDTYRKKDLSERWQEMKAGSGQYIQRDVLSALLLYCADIEKEIHIPKVAVEQLEGAKQLLTDAGYVVLKSTSSRDQRDPRLAPEPKAMTPEMARQKILRGAGDSHLPTDQALGRIRAGGKVSTWSKETFPLQRGVV

SEQ ID NO: 3315 - protein, 530 aa, unidentified
  REGION 1..530: note = Category: MG91 effectors
  REGION 1..530: note = Description: MG91-507 effector
  source 1..530: note = uncultivated organism sequence
MPSQSFVIELPIAVDEAEMRTIVRKLEFARQLHNATLGTAMGQLQQMRQDAAWKEACVMPKGKERAAAFRALDRKYGLTEYDLHSVIARHREGSGRKAELGINETQKIATRVFQAINRYKLGLGGMPRFKSSKRGLHSIEGKTNKTGLKFRPEKKVLNWCGHDYRVLIDPKDDYIQRALKENERSDKYRKIKYCRLVRKRIRSSDRFFLQVVLEGTAPVKHVYAPVTERAAIDPGPQSIALFSKEFAGKIQVAGSNNFNEAASRRLLRAMDRSLRRNNPDAYNENGTIKKGAKLVKSKNYQRKVDRLREMHRVAAAERKCRHGQTINLLLSIAGDIRIEKNSWKAFQRGHFGKSLGKSAMSGFIAQLKSKAASAGLKVTEVNPYKLRLSQYDPYTDTYRKKDLSERWQEMKAGSGLYIQRDVLSALLLYCADIEKEIHIPKVAVEQLEGAKQFLTDAGYVVLKSTSSRDQRDPRLASEPKAMTPEMARQKILRGAGDSHLPTDQELGQIRAGGKVSTWSKETFPLQRGVV

SEQ ID NO: 3316 - protein, 497 aa, unidentified
  REGION 1..497: note = Category: MG91 effectors
  REGION 1..497: note = Description: MG91-508 effector
  source 1..497: note = uncultivated organism sequence
MTSPTFIIELPIRVSDSESRTILRKLEFARQLHNATLGTALGQLQQLRQDSEWEKACLMPKGKERSELFRKLDRKYQLTEYDLHTVIAKHRQRSGRKTELGINETQKIATRVFQAVNRYKLGLGGRPRFKSLSRGLRSIEGKSNKTGLKFNIEKSVLSWCKHDYRVFIDPQDDFLQRALRSEGRSGFKKVKYCRLVRKTIKGKNRFYLQVVLEGQAPIKHIYASTSERLSIDPGPQTIAVFSDVWAGKIKVSPTAQVDEKRLRCIQRSMDRSLRKSNPDCYESDGTLRKGCVLKKTKGYEKRIQRFQECHRKAAATRRCEHGQLINLLLSMAGDIRVEKNQWKAFQRGHFGKSLGKSGISGFIERLKSKAESAGLKVTEVKPYKLKLSQYDPYTDQYRKKSLNERWHSLGESSEWIQRDVMSALLLQCADLEEEKHIPTEVIKTLEGVKQLLRDAGYVILKPSSNGESNPTFASEPKAVTPEKVRLEIFCGASDSYL

SEQ ID NO: 3317 - protein, 537 aa, unidentified
  REGION 1..537: note = Category: MG91 effectors
  REGION 1..537: note = Description: MG91-509 effector
  source 1..537: note = uncultivated organism sequence
MSTKSFIINLPIITGDQDRRRLRKSFSFGCNLQNAVMGGGWDRVLRMRATPEWQAARVMPKGSERTKAFRDLRVRFRLSEYDFHADVAKHRKASGRGHLLGINECQKLASRAWISVERHLYNGGSPRFISSRRGLHSIEGKTNRTGIIWKADQQCVTVCKRVYRVRVDKRDDWLTRALQDPTDPTKPRKVKYCRIVREMRKGKERFLLQLVAEGTSPLKHAYAGKDLRMAIDPGLGSLTYATEDGTIAKVQIAPSADTDHRAIRRIQRAMERSRRATNPDNYEAVDVVRHGKKKKSFKVKSGRLQWRFSKRYESLRAELAEIFRLSAATRKREHGEVCNWLLGHAGSIIVEDNSFKAFQKGHFGKSIGRHAPAAFYTQLTSKAESAGLQVTVVSPRKLKPSQHNLLTDTFVKHELWERRVRLGNDDDDRWIDRDAAACLNLLYADLEKQTYAPERIREAVLAGVTAWLDAGVVVIQAREGITEREFGRFRRRGIPSLTVQGLRQQGFRGRSDSKSGTTPRRKASTESKPSHFSGEVV

SEQ ID NO: 3318 - protein, 537 aa, unidentified
  REGION 1..537: note = Category: MG91 effectors
  REGION 1..537: note = Description: MG91-510 effector
  source 1..537: note = uncultivated organism sequence
MSTKSFIINLPIITGDQDRRRLRKSFSFGCNLQNAVMGGGWDRVLQMRATAEWQATRAMPKGRERTKAFRDLRVRFRLSEYDFHADVAMHRKASGRGHLLGINECQKLASRAWISVERHLYNGGSPRFISSRRGLHSIEGKTNRTGIIWKADQQCVTVCKRVYRVRVDKRDDWLTRALQDPTDPKKPRKVKYCRIVREMRKGKERFLLQLVAEGTSPLKHAYAGKDLRMAIDPGLGSLTYATEDGTIAKVQIAPSADTDHRAVRKLQRAMERSRQATNPDNYETVEVVRHGKKHKSLKVKSGRLQWRFSKRYESLRAELAEIFRLSAATRKREHGEVCNWLLGHAGHIIVEDNSYKAFQRGRFGKTIGRHAPAALYAQLTNKAESAGLLVEVVSPKKLKPTQHNLLTGQFVKHELWERRVRLGNDDDDRWIDRDAAACLNLLYADLEKQIYAPERIREAVLAGVTAWLDAGVVVIQAREGITEREFGRFRRRGIPSLTVQGLRQQGFRGRSDSKSGATPRRKASTVSKPSHFSGEVV

SEQ ID NO: 3319 - protein, 497 aa, unidentified
  REGION 1..497: note = Category: MG91 effectors
  REGION 1..497: note = Description: MG91-511 effector
  source 1..497: note = uncultivated organism sequence
MTSPTFIIELPIRVSDSESRTILRKLEFARQLHNATLGTALGQLQQLRQDSEWEKACLMPKGKERSELFRKLDRKYQLTEYDLHTVIAKHRQRSGRKTELGINETQKIATRVFQAVNRYKLGLGGRPRFKSLSRGLRSIEGKSNKTGLKFNIEKSVLSWCKHDYRVFIDPQDDFLQRALRSEGRSGFKKVKYCRLVRKTIKGKNRFYLQVVLEGQAPIKHIYASTNERLSIDPGPQTIAVFSDVWAGKIKVSPTAQVDEKRLRCIQRSMDRSLRKSNSDCYESDGTLRKGCVLKKTKGYEKRIQRLQECHRKAAATRRCEHGQLINLLLSMAGDIRVEKNQWKAFQRGHFGKSLGKSGISGFIERLKSKAESAGLKVTEVKPYKLKLSQYDPYTDQYRKKSLNERWHSLGESSEWIQRDVMSALLLQCADLEEEKHIPTEVIKTLEGVKQLLRDAGYVILKPSSNGESNPTFASEPKAVTPEKVRLEIFCGASDSYL

SEQ ID NO: 3320 - protein, 537 aa, unidentified
  REGION 1..537: note = Category: MG91 effectors
  REGION 1..537: note = Description: MG91-512 effector
  source 1..537: note = uncultivated organism sequence
MSTKSFIISLPIITGDQDRRRLRKSFSFGCNLQNAVMGGGWDRVLKMRATAEWQTARAMPKSSERTKAFRDLRVRFRLSEYDFHADVAKHRKASGRGHLLGINECQKLASRAWISVERHLYNGGSPRFISSRRGLHSIEGKTNRTGIIWKADQQCVTVCKHVYRVRVDKCDDWLTRALQDPTDPTKPRKVKYCRIVREMRKGKERFLLQLVAEGTSPLKHAYAGKDLRMAIDPGLGSLTYATEDGTIAKVQIAPSADTDHRAIRRIQRAMERSRRATNPDNYEAVDVVRHGKKKKSFKVKSGRLQWRFSKRYESLRAELAEIFRLSAATRKREHGEVCNWLLGHAGSIIVEDNSFKAFQKGHFGKSIGRHAPAAFYTQLTSKAESAGLQVTVVSPRKLKPSQHNLLTDTFVKHELWERRVRLGEDDDERWIDRDAAACLNLLYADIENQTYDPERIREAVLAGVTAWLDAGVVVIQAREGITEREFGRFRRRGIPSLTVQGLRQQGFRGRSDSKSGTTPRRKASTESKPSHFSGEVV

SEQ ID NO: 3321 - protein, 1356 aa, unidentified
  REGION 1..1356: note = Category: MG91 effectors
  REGION 1..1356: note = Description: MG91-513 effector
  source 1..1356: note = uncultivated organism sequence
MLEKPYYLGLDMGTNSVGWAVTDQQYNLLKAKGKDLWGIREFAEADTSVERRTHRISRRRRQREQARIGLLNDYFHDAIIAIDPSFFQRLENSKYHLEDKDQNVRYKYNIFNDPDYTDADYYTQYPTIYHLRKELLENPKPHDVRLVYLALLNMFKHRGHFLNSGISDGNNERSLKDAYINFAISVSELTEDYFNQDVDYSTIEGILSSRDLNRTKKAEELSTVLGIDFKNKKYKEYLRAICGLKINAYTLFSDQLPDDTTKIDLCVSDASFDEKSEELVSLIGEDLFQIILNIKEIYDIGSLAGILKGYTYLSQARVAAYDKHKHDLKLLKSSIKKYCTKEEYNNFFNSDADGSYASYIGSFNSGNKERRVGSKRTSEDLYKEIKKLLKGANKSDPAINEIFTSIETESFLPKQLTASNGIIPNQVHSKEMARILTNAENYLPFLKETDENNLSISNRILQLYKFQIPYYIGPVTEKSQRDGGNGWVIRKDNGRVFPWNIEEKIDVKATSEAFISRMVRRCTYMNGKQVLPKASLEYESFRVLNEINNLRIDGERIPVTLKQDIYTDLFQKGKKVTKKQLCNYLATRGLIESSEQVTGIDIAINNSLSTYGKFKAIFGEDIKLDHIQHMIEDIVFWCTVYGDSKQFLKEQIEDKYKGKLSPEQMKRILGFKFKDWGNLSKEFFELKGADKSTGEAVSIIRALWENNLNLMELINSPEFDFKEQLADYEANSLKTLSDFEPEDLNDYYFSAPVRRMIWQTTLIIKELVHVLGKEPARIFIEMTREKDASRGRTLSRKKKFEDLYKNVKDENTDWAKVIEHADESGTIRSKKMYLYLTQKGRCMYTGNHIELSDLFNDNLYDIDHIYPRHFVKDDNIDNNLVLVTKEKNAHKSDNYPLEAEIFNKQRNMWTQLRKEGFISEEKYNRLMGRNAFTDEQKAGFIARQLVETSQGTKGVAELFHQLLPNSKIVCAKAGNVSDFRRNRELPKSRLVNDFHHAHDAYLNIVVGNVYYVKFTQNPINYIKNSYNKDMNKNNYNLSRMFDWDVKRGDEVAWIAQKQDGATGTISTVKKMLSKNTPLMTRLSYEGKGALANETLYSAEKAKGEGYIPFKSSDTKIQDVTKYGGFTSVTGAYFFLVEHDEKKKRIRTIESVPLYLADKIDKDSSELERYCDKLGLVNYDIRVRKIKIGSLLNRNGYFAYLTGKTGKQLILRNATNLCLDKKWTRYIKKIEKYKETNVLDSIITSETMVNLYNELLNKFTVGIYGRRPNPIGEKMDSAKNTFTSYTLDNQCNLIYQLSKILGFETDLSLLRTNKQSGKPTREGGMQISKKIDNTTSMYLINQSPTGLFETKIDLQTI

SEQ ID NO: 3322 - protein, 1352 aa, unidentified
  REGION 1..1352: note = Category: MG91 effectors
  REGION 1..1352: note = Description: MG91-514 effector
  source 1..1352: note = uncultivated organism sequence
MTAFKYYLGLDMGTNSVGWAATDPEYRLLKAKGKDLWGIREFNEASGAVERRTHRISRRRRQREQVRIGILKDYFHDAICEVDPSFFRRLENSKYHEEDKDVEVRYKNNIFNDGNYTDKDYFNEYPTIYHLRNELISSTEKHDVRLVFLALLNMFKHRGHFLNAGLGENNGESNIDNAYFELTELLSELTEYHLSQDIDCKQIEAILSRRDMSRTHKAEELAGVLHVDLKNKPYKELIRGLCGLKFNACVVFPDVQSEEVTKLDICLSESSFDEKSDEIANIIGEDYFEIIMAMKEMFDIGSLASIMKGHNYLSQARVASYTKHKEDLKLLKEVIKKYCSKKEYDKFFNSDADGSYASYVGSYNSKNKERRVGNKRTSEELYKEIKKLLKDAPKEDENVQKILTSIENETFLPKQLTASNGVIPNQVHAREMKKILSNAENYLPFLTEKDETGLSVSERILKLFTFQIPYYVGPTSENSGKNGGNGWVVRREDGQVLPWNIDEKIDMKATSEAFISRMVRRCTYISGEQVLPKASLEYQSYCVLNEINNIKIDGERISVELKQDIYKAVFQKGKKVTKKQLCKYLHTRGIIETEEQVTGVDVSINNALTTYGKFKPIFGEDISKDSVQKMIEDIVFWCTVYGDSKKFLKDRIEEKYGNKLSEEQIKRILGFKFKDWGNLSKKFLELNGADTSTGESISIIRALWNNNLNLMELINSSLYNYKECLAEYQNTMLKTLSEIEAEDLNEYYFSAPVRRMIWQTILVIKELVKVLGCEPERIFVEMTRRPDEHKTRTSSRRNKFEELYKKVKDEATDWMQVIAKAEEDGKIRSKKMYLYLTQKGRCMYTGKHIELDDLFDKNLYDIDHIYPRHFVKDDNIDNNLVLVCKEKNAHKSDHYPIEEEIFLSQKKMWLELRKSGFITEEKYNRLMDRNPFSDEQKAGFIARQLVETSQGTKGVANILRQLLPGSKIVYAKASNVSEFRHTRDDIPKSRLVNDFHHAHDAYLNIVVGNVYYVKFTQNPLNFIKKDYDKYKEDYNLSKMFDWDVKRNGEVAWIAQRKDGEAGTITTVKRMLSRNTPLMTRYSFEGKGGLANETLCSAKKAKGEGYIPFKSSDDKMQDVTKYGGFTKVTGAYFFLVEHTEKKKRIRTIESVPVYLAQKIEQNPDELKKYCKEILGLVDADIRLKKIKIGSLIKRNGYFCYITGKTGNRLSVRNAVNLCLKNEWIKYISKLEKVKEKDAVDEIITKEKNEVLYSELIQKFKHGIFSKRPNPVEDKLEKGSEKFSNLSIKEQCALLCQILQLAAVLGSECDMTLLGESAHCGKMLISKKIGDEEIYLLNQSVTGLYEKKINLHTV

SEQ ID NO: 3323 - protein, 1033 aa, unidentified
  REGION 1..1033: note = Category: MG91 effectors
  REGION 1..1033: note = Description: MG91-515 effector
  source 1..1033: note = uncultivated organism sequence
MTAFKYYLGLDMGTNSVGWAATDPEYRLLKAKGKDLWGIREFNEASGAVERRTHRISRRRRQREQVRIGILKDYFHDAICEVDPSFFRRLENSKYHEEDKDVEVRYKNNIFNDGNYTDKDYFNEYPTIYHLRNELISSTEKHDVRLVFLALLNMFKHRGHFLNAGLGENNGESNIDNAYFELTELLSELTEYHLSQDIDCKQIEAILSRRDMSRTHKAEELAGVLHVDLKNKPYKELIRGLCGLKFNACVVFPDVQSEEVTKLDICLSESSFDEKSDEIANIIGEDYFEIIMAMKEMFDIGSLASIMKGHNYLSQARVASYTKHKEDLKLLKEVIKKYCGKKEYDKFFNSDADGSYASYVGSYNSKNKERRVGNKRTSEELYKEIKKLLKDAPKEDENVQKILTSIENETFLPKQLTASNGVIPNQVHAREMKKILSNAENYLPFLTEKDETGLSVSERILKLFTFQIPYYVGPTSENSGKNGGNGWVVRREDGQVLPWNIDEKIDMKATSEAFISRMVRRCTYISGEQVLPKASLEYQSYCVLNEINNIKIDGERISVELKQDIYKAVFQKGKKVTKKQLCKYLHTRGIIETEEQVTGVDVSINNALTTYGKFKPIFGEDISKDSVQKMIEDIVFWCTVYGDSKKFLKDRIEEKYGNKLSEEQIKRILGFKFKDWGNLSKKFLELNGADTSTGESISIIRALWNNNLNLMELINSSLYNYKECLAEYQNTMLKTLSEIEAEDLNEYYFSAPVRRIIWQTILVIKELVKVLGCEPERIFVEMTRRPDEHKTRTSSRRNKFEELYKKVKDEATDWMQVIAKAEEDGKIRSKKMYLYLTQKGRCMYTGKHIELDDLFDKNLYDIDHIYPRHFVKDDNIDNNLVLVCKEKNAHKSDHYPIEEEIFLSQKKMWLELRKSGFITEEKYNRLMGRSPFSDEQKAGFIARQLVETSQGTKGVANILRQLLPGSKIVYAKASNVSEFRHTRDDIPKSRLVNDFHHAHDAYLNIVVGNVYYVKFTQNPLNFIKKDYDKYKEG

SEQ ID NO: 3324 - protein, 1358 aa, unidentified
  REGION 1..1358: note = Category: MG91 effectors
  REGION 1..1358: note = Description: MG91-516 effector
  source 1..1358: note = uncultivated organism sequence
MEKEYYLGLDMGTNSVGWAVTDDAYNLIRFKGKDMWGIREFDEANPAVERRTHRTSRRRKQRNAVRMGLIRSYFADEIQKVDSNFYQRLDNSFFHVEDKQDNVKDKNGIFNDKNYKDADYYKQYPTIFHLRKELIEDASQKDVRLVYLAVANMFKHRGHFLLSGIGSESSKQTITDLYNQVSGLITEEYGISLKTDIAGTDFEQVLCSREYSRTRKSEKVCEILEIKNSDKLKKAFVKSMCGLSVKITDIIDDTFTEISDEDKKITFSFVDSDYDEKAGVLEEKLGTDVYDIISKLKEIHDKAQVAEIMKNYQYLSFARVADYEKHKKDLKILKRVVKKYFEPTVYDKLFRSEENGTYSAYVNSFNSEEKSRRNYKERKQEDLYNSIKKLLKSVDNVDDTDIEYIKNEMDKENFLPKQLTFKNGVIPNQIHASELKAILKNAEKYLPFLNEKDESGYTVSERILMLFSFQIPYYVGPVSSNSNGWVKRLEPGQVLPWNIDKKIDLKETSEQFIQRMVRNCTYIAGEKVLPKASLLYENFKVLNEINNLSINGERITVNLKQDLYNTLFLKGKRVTRKQIFNYFHSRGLVEEDSQISGIDIAVNNSLSTYGKFLPLFGEHLKEDKYKKMVDDIVFWCTVYGDSRKFLREQLEEKYSDVLDENQIKRITGMKFKDWGNLSKEFLELSGCCKSTGEVMPLIRAMWETNYNLMELLHGEEFTYSEELEEKQGKIEKVLSEYTIDDLNEEYFSAPVKRMVWQTLLIIKEIEKIMKCPPTRIFVEMTRKDDEKGDNGRKSSRKDQLLALYKKIQSEDKEWKKEMSSRIEDYDKNGALRSKKLYLYFIQKGLDMYTGKPIDLDNLMSANSNYDIDHIYPRHFVKDDNINNNLVLASKPANAEKSDIYPIKDSIYQKMKYTWKVLRDEGLITEEKYKRLTGRNPFTDEQKAGFIARQLVETGQGTKGVADLLTALLPDTKLVYSKAGNVSDFRKRYDIPKSRLINDFHHAHDAYLNIVVGNIYFTKFTSNPLNYIRKECSSKDNKYQYNLGNMYKWDVKRDGKTAWVAPEEGETGTLATVKKMLSRNTPILTRLTIEGHGGIADATLYSHKKAKQDTYIPLKSSDARMADVTKYGGYSSVTTAYLFLVEHEIKGKKIRTLETVPIYLKDRLENSKEKLEENCRETLGYTNPSVRMKKIKLQSLIKLNGYYMQISGRTGNRFTLRNYVQLCLNGKWVDYIHKLEKYQDKGVIDDLITDERNVELYNVLCEKHSVGIFTLRPNLVGDKIKNGYDKFVNLTTEEQIKLLIEIIKLTCVGIVSANLTLIGGAAISGKMLMSKNITYANECILINQSVTGLYENRIDLLRV

SEQ ID NO: 3325 - protein, 1352 aa, unidentified
  REGION 1..1352: note = Category: MG91 effectors
  REGION 1..1352: note = Description: MG91-517 effector
  source 1..1352: note = uncultivated organism sequence
MTAFKYYLGLDMGTNSVGWAATDPGYRLLKAKGKDLWGIREFNEASGAVERRTHRISRRRRQREQVRIGILKDYFHDAICEVDPSFFQRLENSKYHEEDKDVEVRYKNNIFNDSNYTDKDYFNEYPTIYHLRNELISSTEKHDVRLVFLALLNMFKHRGHFLNAGLGENNGESNIDNAYFELTELLSELTEYHLSQDIDCKQIEAILSRRDMSRTHKAEELAGVLHVDLKNKPYKELIRGLCGLKFNACVVFPDVQSEEVTKLDICLSESTFDEKSDEIANIIGEDYFEIIMAMKEMFDIGSLASIMKGHNYLSQARVASYTKHKEDLKLLKEVIKKYCGKKEYDKFFNSDADGSYASYVGSYNSKNKERRVGNKRTSEELYKEIKKLLKDAQKEDENVQKILTSIENETFLPKQLTASNGVIPNQVHAREMKKILSNAENYLPFLTEKDETGLSVSERILKLFTFQIPYYVGPTSENSGKNGGNGWVVRREDGQVLPWNIDEKIDMKATSEAFISRMVRRCTYISGEQVLPKASLEYQSYCVLNEINNIKIDGERISVELKQDIYKAVFQKGKKVTKKQLCKYLHTRGIIETEEQVTGVDVSINNALTTYGKFKPIFGEDISKDSVQKMIEDIVFWCTVYGDSKKFLKDRIEEKYGNKLSEEQIKRILGFKFKDWGNLSKKFLELNGADTSTGESISIIRALWNNNLNLMELINSSLYNYKECLAEYQNTMLKTLSEIEAEDLNEYYFSAPVRRMIWQTILVIKELVKVLGCEPERIFVEMTRKPDEHKTRTSSRRNKFEELYKKVKDETTDWMQVIANAEEDGKIRSKKMYLYLTQKGRCMYTGKHIELDDLFDNNLYDIDHIYPRHFVKDDNIDNNLVLVCKEKNAHKSDHYPIEEEIFLSQKKMWLELRKSGFITEEKYNRLMDRNPFSDEQKAGFIARQLVETSQGTKGVANILRQLLPGSKIVYAKASNVSEFRCTRDDIQKSRLVNDFHHAHDAYLNIVVGNVYYVKFTQNPLNFIKKDYDKYKEDYNLSKMFDWDVKRNGEVAWIAQRKDGAAGTITTVKRMLSRNTPLMTRYSFDGKGGLTNETLYSAKKAKGEGYIPFKSSDDKMQDVTKYGGFTSVTGAYFFLVEHTEKKKRIRTIESVPVYLAQKIEQNPDELKKYCEEILGLIDADIRLKKIKIGSLIKRNGYFCYITGKTVNRLIVRNAVNLCLKNEWIKYISKLEKVKEKDAVDKIITKEKNEVLYSELIQKFKHGIFSKRPNPVGDKLEKDSEKFNNLSIKDQCAVLCQVLRMAAILGSECDMTLLGDSPNCGKMLISKKIGDEEIYLINQSVTGLYEKKINLHTV

SEQ ID NO: 3326 - protein, 613 aa, unidentified
  REGION 1..613: note = Category: MG91 effectors
  REGION 1..613: note = Description: MG91-518 effector
  source 1..613: note = uncultivated organism sequence
MMAKETFVLTLPLKVEKWQADILDKRYELLRQIYNMVQQKLLRQYIYFSQQKAYKTCKGDFQQIREFFASHPFHFKDIKGRNGEPSDIKFPYTYESRSSSSGKRTPNGISDFISKLWAHRIGEDKTLADFGINSSILEELGLHVMQAWEKRIYDPKSSRVSFKKYGDINSFGSRCKNGSFAGFTINLGKGHITFNTNGRQRKSAELITLPIDFSREKKGYAASALKDGIDSLRKLIIVRKCIRGKNKYYLQLTISGEKPQKGRTLGRGNVGIDIGPSTIAISSLQCVHFEKLADRCDNIEHDLFLVNRKLDRSRRANNPLNFNTDRTIKRISRQKGEHRVWHDSNRYKRLKLVRKELFRKQAEIRKQQHLQMANVILSQGDTFVVENNPIDAWARRAKETTKTKTGKNRCKKRYGKSVANHAPAMFVSILRNKVQSLGGAFHEVDVRYAATQFDFTNGTKTKHEVSERSITLSNGHTHQRDMLSAFNLQHIKLESIGTEDKEYDIEQMEADYPIFRELETAELRRFKVVRHNERDALYFAGASEKHLRHQPQDESVDNRHNGGVGRKHCNTRIGSENAEITGSGLVRESIERVSQVPDEYHISSHQPIVLDGL

SEQ ID NO: 3327 - protein, 530 aa, unidentified
  REGION 1..530: note = Category: MG91 effectors
  REGION 1..530: note = Description: MG91-519 effector
  source 1..530: note = uncultivated organism sequence
MTSPSFVIELPIAVDDAEMRTIVRKLEFARQLHNATLGTAMGQLQQMRQDAAWKEACVMPKGKERAAAFRALDRKYGLTEYDLHSVIARHREGTGRKAELGINETQKIATRVFQAINRYKLGLGGMPRFKSFKRGLHSIEGKTNKTGLKFKPEQKVLNWCGHDYRVLIDPKDDYIQRALKDNERSDQYRKIKYCRLVRRRIRSADRFFLQVVLEGTAPVKHVYAPVTERAAIDPGPQSIALFSKAFAGKIQVAGSNNFNEAASRRLLRAMDRSLRRNNPDAYNEDGTINKGVKLAKSKNYQRKVDRLHEMHRVAAAQRKCRHGQTINLLLSIAGDIRIEKNSWKAFQRGHFGKSLGKSAMSGFIAQLKSKAESAGLKVTEVNPYKLKLSQYDPYTDTYRKKDLSERWQEMKAGSGQYIQRDVLSALLLYCADIEKEIHIPKAAVEQLEGAKQLLTDAGYVVLKSTSSRDQRDPRLASEPKAMTPEMARQKILRGAGDSHLPTDQALGRIRAGEKVSTWSKETFPLQRGVV

SEQ ID NO: 3328 - protein, 484 aa, unidentified
  REGION 1..484: note = Category: MG91 effectors
  REGION 1..484: note = Description: MG91-520 effector
  source 1..484: note = uncultivated organism sequence
MAHKENQKAFVITFPLRTEKWQEDRIDKMMRMLTTLYNDRQRKLVRRYIYLSHSKAYHEAKGKGVVAFKNYMKENGFSQYGLDAFFKADTKGALYQCGLNSMFLQYLSQCAWSAWDKKLFGKGDFVKTDKVVNIFCSRNKNGRFCGFDYDLSTFTIRIKSTCTKEIICSIPFVVNKNSEYELYALSQKICRIGIVRKLIRSKYKYYVQFTFDGVPYNKGRNIGTGIVGIDPGPSKIAIVGDNKVEIVKLAPNIEEDERKTARLKRKLDRSRRATNPHMYNEDGTIIKGQRQTCFSKAYNETRKQLADAQRKLAAKRKIAHNELANTLLEYGDTFKVEANSYKSMQARTKATSMTKSGRIRSKKRYGKSIKNRAPSEFLVILKNKLLYYPKGKYYDVPSSYACTQFDFTNESFTEHKISERRIVTSDGIQHNRDTLAAFNIKNAIVNDTSTKKKKFTKSKEFFDIVKMKASYNKFCVMERYLLSV

SEQ ID NO: 3329 - protein, 1358 aa, unidentified
  REGION 1..1358: note = Category: MG91 effectors
  REGION 1..1358: note = Description: MG91-521 effector
  source 1..1358: note = uncultivated organism sequence
MEKEYYLGLDMGTNSVGWAVTDDAYNLIRFKGKDMWGIREFDEANPAVERRTHRTSRRREQRNAVRMGLIRSYFADEIQKVDSNFYQRLDNSFFHVEDKQDNVKDKNGIFNDKNYKDADYYKQYPTIFHLRKELIEDDSQKDVRLVYLAVANMFKHRGHFLLSGIGSESSKQTITDLYNQVSGLITEEYGISLKTDIAGTDFEQVLCSREYSRTRKSEKVCEILEIKNSDKLKKAFVKSMCGLSVKITDIIDDTFTEISDEDKKITFSFVDSDYDEKAGVLEEKLGTDVYDIISKLKEIHDKAQVAEIMKNYQYLSFARVADYEKHKKDLKILKRVVKKHFEPTVYDKLFRSEENGTYSAYVNSFNSGEKSRRNYKERKQEDLYNSIKKLLKSVDNVYDTDIEYIKNEMDKENFLPKQLTFKNGVIPNQIHASELKAILKNAEKYLPFLNEKDESGYTVSERILMLFSFQIPYYVGPVSSNSNGWVKRLESGQVLPWNIDKKIDLKETSEQFIQRMVRNCTYIAGEKVLPKASLLYENFKVLNEINNLSINGERITVNLKQDLYNTLFLKGKRVTRKQIFNYFHSRGLVEEDSQISGIDIAVNNSLSTYGKFLPLFGEHLKEDKYKKMVDDIVFWCTVYGDSRKFLREQLEEKYSDVLDENQVKRITGMKFKDWGNLSKEFLELSGCCKSTGEVMPLIRAMWETNYNLMELLHSEEFTYSEELEEKQGKIEKVLSEYTIDDLNEEYFSAPVKRMVWQTLLIIKEIEKIMKCPPTRIFVEMTRKDDEKGDNGRKSSRKDQLLALYKKIQSEDKEWKKEMSSRIEDYDKKGALRSKKLYLYFIQKGLDMYTGKPIDLDNLMSANSNYDIDHIYPRHFVKDDNINNNLVLASKPANAEKSDIYPIKDSIYQKMKYTWKVLRDEGLITEEKYKRLTGRNPFTDEQKAGFIARQLVETGQGTKGVADLLTALLPDTKLVYSKAGNVSDFRKRYDIPKSRLINDFHHAHDAYLNIVVGNIYFTKFTSNPLNYIRKECSSKDNKYQYNLGNMYKWDVKRDGKTAWVAPEEGETGTLATVKKMLSRNTPILTRLTIEGHGGIADATLYSHKKAKQDTYIPLKSSDARMADVTKYGGYSSVTTAYLFLVEHEIKGKKIRTLETVPIYLKDRLENSKEKLEEYCRETLGYTNPSVRMKKIKLQSLIKLNGYYMQISGITGNRFTLRNYVQLCLNGKWVDYIHKLEKYQDKGVIDDLITDERNVELYNVLCEKHSVGIFTLRPNLVGDKIKNGYDKFVNLTTEEQIKLLIEIIKLTCVGIVSANLTLIGGAAISGKMLMSKNITDANECILINQSVTGLYENRIDLLRV

SEQ ID NO: 3330 - protein, 537 aa, unidentified
  REGION 1..537: note = Category: MG91 effectors
  REGION 1..537: note = Description: MG91-522 effector
  source 1..537: note = uncultivated organism sequence
MSTKSFIISLPIITGDQDRRRLRKSFSFGCNLQNAVMGGGWDRVLQMRATPEWQATRAMPKGRERTKAFRDLRVRFRLSEYDFHADVAMHRKASGRGHLLGINECQKLASRAWISVERHLYNGGAPRFISSRRGLHSIEGKTNRTGIIWKADQQCVTVCKHVYRVRVDKRDDWLTRALQDPTDPTKPRKVKYCRIVREMRKGKERFLLQLVAEGTSPLKHAYAGKDLRMAIDPGLGSLTYATEDGTIAKVQIAPSADTDHRAVRKLQRAMERSRQATNPDNYETVEVVRHGKKHKSLKVKSGRLQWRFSKRYEKLRSELAEMLRLCAATRKREHGEVCNWLLGHAGHIIVEDNSFKAFQKGHFGKSIGRHAPAAFYTQLTSKAESAGLQVTVVSPRKLKPSQHNLLTDTFVKHELWERRVRLGKDDDDRWIDRDAAACLNLLYADIENQTYDPERIREAVLAGVTAWLDAGVVVIQAREGITEREFGRFRRRGIPSLTVQGLRQQGFRGRSDSKSGATPRRKASTVSKPSHFSGEVV

SEQ ID NO: 3331 - protein, 537 aa, unidentified
  REGION 1..537: note = Category: MG91 effectors
  REGION 1..537: note = Description: MG91-523 effector
  source 1..537: note = uncultivated organism sequence
MSTKSFIISLPIITGDQDRRRLRKSFSFGCNLQNAVMGGGWDRVLKMRATAEWQTARAMPKNSERTKAFRDLRVRFRLSEYDFHADVAKHRKASGRGHLLGINECQKLASRAWISVERHLYNGGSPRFISSRRGLHSIEGKTNRTGIIWKADQQCVTVCKHVYRVRVDKRDDWLTRALQDPTDPTKPRKVKYCRIVREMRKGKERFLLQLVAEGTSPLKHAYAGKDLRMAIDPGLGSLTYATEDGTIAKVQIAPSADTDHRAIRRIQRAMERSRRATNPDNYEAVDVVRHGKKKKSFKVKSGRLQWRFSKRYESLRAELAEIFRLSAATRKREHGEVCNWLLGHAGSIIVEDNSFKAFQKGHFGKSIGRHAPAAFYTQLTSKAESAGLQVTVVSPRKLKPSQHNLLTGQFVKHELWERRVRLGNDDDDRWIDRDAAACLNLLYADLEKQTYAPERIREAVLAGVTAWLDAGVVVIQAREGITEREFGRFRRRGIPSLTVQGLRQQGFRGRSDSKSGATPRRKASTVSKPSHLSGEVV

SEQ ID NO: 3332 - protein, 530 aa, unidentified
  REGION 1..530: note = Category: MG91 effectors
  REGION 1..530: note = Description: MG91-524 effector
  source 1..530: note = uncultivated organism sequence
MTSPSFVIELPIAVDDAEMRTIVRKLEFARQLHNATLGTAIGQLQQMRQDTAWKQACAMPKGKERTAAFRALDRKYGLTEYDLHSVIARHREGTGRKAELGINETQKIATRVFQAINRYKLGLGGMPRFKSFKRGLHSIEGKTNKTGLKFKPEQKVLNWCGHDYRVLIDPKDDYIQRALKDNERSDQYRKIKYCRLVRRRIRSADRFFLQVVLEGTAPVKHIYAPVVERAAIDPGPQSIALFSKEFAGKIQVAGPNNFNEAASRRLLRAMDRSLKRNNPDAYNEDGTIKKGAKLVKSKNYQRKVDRLHEMHRVSAAERRCLHGQTINLLLSIAGDIRIEKNSWKAFQRGHFGKSLGKSAMSGFIAQLKSKAESAGLKVTEVNPYKLKLSQYDPYTDTYRKKALSERWQEMKAGSGQYIQRDVLSALLLYCADIEKEIHIPKAAVEQLEGAKQLLTDAGYVVLKSTSSRDQRDPRLAPEPKAMTPEMARQKILRGAGDSHLPTDQALGWIRAGEKVSTWSKETFPLQRGVV

SEQ ID NO: 3333 - protein, 484 aa, unidentified
  REGION 1..484: note = Category: MG91 effectors
  REGION 1..484: note = Description: MG91-525 effector
  source 1..484: note = uncultivated organism sequence
MAHKENQKAFVVTFPLRTEKWQEDRIDKMMRMLTTFYNDRQRKLVRRYIYLSHSKAYKEAKGKGVVAFKNYMKENGFSQYGLDAFFKADTKGALYQCGLNSMFLQYLSQCAWSAWDKKLFGKGDFVKTDKVVNIFCSRNKKERFCGFDYDLSTFTIRIKSTCTKKIICTIPFVVNKNSEYELYALSQKICRIGIVRKLIRSKYKYYVQFTFDGVPYNKGRNIGTGIVGIDPGPSKIAIVGDNKVEIAKLAPNLIEDERKTARLKRKLDRSRRATNPHMYKEDGTIIKGQRQTCFSKVYNETRKQLADAQRKLAAKRKIAHNELANTLLEYGDTFKVEANSYKSMQARAKATSMTKSGRIRSKKRYGKSINNRAPSEFLVILKNKLLYYPKGKYYDVPSSYACTQFDFTNESFTEHKISERRIVTSDGIQHNRDTLAAFNIKNAIVNDTSTKKKKVTKSKEFFDIVKMKASYNDFCLMERYLLSV

SEQ ID NO: 3334 - protein, 525 aa, unidentified
  REGION 1..525: note = Category: MG91 effectors
  REGION 1..525: note = Description: MG91-526 effector
  source 1..525: note = uncultivated organism sequence
MTSQSFVIELPIAVDDAEMRTIVRKLEFARQLHNATLGTAMGQLQQMRQDAAWKEACVMPKGKERAAAFRALDRKYGLTEYDLHSVIARHREGSGRKAELGINETQKIATRVFQAINRYKLGLGGMPRFKSSKRGLHSIEGKTNKTGLKFRPEKKVLNWCGHDYRVLIDPKDDYIQRALKENERSDKYRKIKYCRLVRKRIRSADRFFLQVVLEGTAPVKHIYAPVTERAAIDPGPQSIALFSKAFAGKIQVAGSSNFNESASRRLLRAMDRSLRRNNPDAYNEDGTIKKGAKLVKSKNYQRKVDRLREMHRVAAAERKCRHGQTINLLLSIAGDIRIEKNSWKAFQRGHFGKSLGKSAMSGFIAQLKSKAASAGLKVTEVNPYKLKLSQYDPYTDTYRKKDLSERWQEMKAGSGQYIQRDILSALLLYCADIEKEIHIPKVAVEQLEGAKQFLTDAGYVVLKSTSSRDQRDLRLAPEPKAMTPEMARQKILRGAGDSHLPTDQALGRIRAGGKVSTWSKETFPL

SEQ ID NO: 3335 - protein, 537 aa, unidentified
  REGION 1..537: note = Category: MG91 effectors
  REGION 1..537: note = Description: MG91-527 effector
  source 1..537: note = uncultivated organism sequence
MSTKSFIISLPIITGDQDRRRLRKSFSFGCNLQNAVMGGGWDHVLQMRVTPEWHATRAMPKGRERTKAFRDLRVRFRLSEYDFHADVAKHRKASGRCHLLGINESQKLASRAWISVERHLYNGGSPRFISSRRGLHSIEGKTNRTGIIWKADQQCVTVCKHVYRVRVDKCDDWLTRALQDPTDPTKPRKVKYCRIVREMRKGKERFLLQLVAEGTSPLKHAYAGKDLRMAIDPGLGSLTYATEDGTIAKVQIAPSADTDHRAIRRIQRAMERSRRATNPDNYEAVDVVRHGKKKKSFKVKSGRLQWRFSKRYESLRAELAEIFRLSAATRKREHGEVCNWLLGHAGHIIVEDNSYKAFQKGHFGKSIGRHAPAAFYTQLTSKAESAGLQVTVVSPRKLKPSQHNLLTDTFVKHELWERRVRLGNDDDDRWIDRDAAACLNLLYADLEKQTYAPERIREAVLAGVTAWLDAGVVVIQAREGITEREFGRFRRRGIPSSTVQGLRQRGFRGRSDSKSGTTPRRKASTVSKPSHFSGEVV

SEQ ID NO: 3336 - protein, 1108 aa, unidentified
  REGION 1..1108: note = Category: MG91 effectors
  REGION 1..1108: note = Description: MG91-528 effector
  source 1..1108: note = uncultivated organism sequence
MTAFKYYLGLDMGTNSVGWAATDPEYRLLKAKGKDLWGIREFNEASGAVERRTHRISRRRKQREQVRIGILKDYFHDAICEVDPSFFQRLENSKYHEEDKDVEVRYKNNIFNDSNYTDKDYFNEYPTIYHLRNELISSTEKHDVRLVFLALLNMFKHRGHFLNAGLGENNGESNIDNAYFELTELLSELTEYHLSQDIDCKQIEAILSRRDMSRTHKAEELAGVLHVDLKNKPYKELIRGLCGLKFNACVVFPDVQSEEVTKLDICLSESTFDEKSDEIANIIGEDYFEIIMAMKEMFDIGSLASIMKGHNYLSQARVASYTKHKEDLKLLKEVIKKYCGKKEYDKFFNSDADGSYASYVGSYNSKNKERRVGNKRTSEELYKEIKKLLKDAQKEDENVQKILTSIENETFLPKQLTASNGVIPNQVHAREMKKILSNAENYLPFLTEKDETGLSVSERILKLFTFQIPYYVGPTSENSGKNGGNGWVVRREDGQVLPWNIDEKIDMKATSEAFISRMVRRCTYISGEQVLPKASLEYQSYCVLNEINNIKIDGERISVELKQDIYKAVFQKGKKVTKKQLCKYLHTRGIIETEEQVTGVDVSINNALTTYGKFKPIFGEDISKDSVQKMIEDIVFWCTVYGDSKKFLKDRIEEKYGNKLSEEQIKRILGFKFKDWGNLSKKFLELNGADTSTGESISIIRALWNNNLNLMELINSSLYNYKECLAEYQNTMLKTLSEIEAEDLNEYYFSAPVRRMIWQTILVIKELVKVLGCEPERIFVEMTRRPDEHKTRTSSRRNKFEELYKKVKDETTDWMQVIANAEEDGKIRSKKMYLYLTQKGRCMYTGKHIELDDLFDNNLYDIDHIYPRHFVKDDNIDNNLVLVCKEKNAHKSDHYPIEEEIFLSQKKMWLELRKSGFITEEKYNRLMGRSPFSDEKKAGFIARQLVETSQGTKGVANILRQLLPGSKIVYAKASNVSEFRHTRDDIPKSRLVNDFHHAHDAYLNIVVGNVYYVKFTQNPLNFIKKDYDKYKEDYNLSKMFDWDVKRNGEVAWIAQRKDGEAGTITTVKKMLSRNTPLMTRYSFEGIFKAYLRNLMRQLEAMEQVECHS

SEQ ID NO: 3337 - protein, 537 aa, unidentified
  REGION 1..537: note = Category: MG91 effectors
  REGION 1..537: note = Description: MG91-529 effector
  source 1..537: note = uncultivated organism sequence
MSTKSFIINLPIITGDQDRRRLRKSFSFGCNLQNAVMGGGWDRVLRMRATPEWQAARVMPKGSERTKAFRDLRVQFRLSEYDFHADVAKHRKASGRSHLLGINESQKLASRAWISVERHLYNSGSPRFISSRRGLHSIEGKTNRTGIIWKADQQCVTVCKHVYRVRVDKRDDWLTRALQDPTDPTKPRKVKYCRIVRNVRKGKECFDLQLIAEGTSPLKHAYAGKDQRMAIDPGLGSLTYATEDGKIAKVQIAPNADTDHRAVRRIQRAMERSRQATNPDNYETVDVVRHGKKRQSLKVKSGRLEWRFSKRYEKLRAELAETHRLAAATRKREHGEVCNWLLGHAGTIIVEDNSFKAFQKGRFGKSIGRYAPAAFYTQLTSKAESAGLQVKVVSPKKLKPTQHNLLTGRFVKHELWERRVQLGDRTGVCWIDRDAAACVNLLYADLDQQTYDPKRIREAVLAGVTAWLDAGVVVIQAREGITEREFGRFRGRGIPSLAVQGLRQQGFRGRSDSKSGTTPRRKASTVPKPSHFSGEVV

SEQ ID NO: 3338 - protein, 537 aa, unidentified
  REGION 1..537: note = Category: MG91 effectors
  REGION 1..537: note = Description: MG91-530 effector
  source 1..537: note = uncultivated organism sequence
MSTKSFIISLPIITGDQDRRRLRKSFSFGCNLQNAVMGGGWDRVLKMRATAEWQTARAMPKSSERTKAFRDLRVHFRLSEYDFHADVAMHRKASGRGHLLGINECQKLASRAWISVERHLYNGGSPRFISSRRGLHSIEGKTNRTGIIWKADQQCVTVCKHVYRVRVDKRDDWLTRALQDPTDPTKPRKVKYCRIVREMRKGKERFLLQLVAEGTSPLKHAYAGKDLRMAIDPGLGSLTYATEDGTIAKVQIAPSADTDHRAVRKLQRAMERSRQATNPDNYEAVDVVRHGKKKKSFKVKSGRLQWRFSKRYEKLRSELAEMLRLCAATRKREHGEVCNWLLGHAGHIIVEDNSYKAFQRGRFGKTIGRHAPAALYAQLTNKAESAGLLVEVVSPKKLKPTQHNLLTGQFVKHELWERRVRLGNDDDDRWIDRDAAACLNLLYADLEKQTYVPERIREAVLAGVTAWLDAGVVVIQAREGITEREFGRFRRRGIPSLTVQGLRQQGFRGRSDSKSGTTPRRKASTESKPSHFSGEVV

SEQ ID NO: 3339 - protein, 535 aa, unidentified
  REGION 1..535: note = Category: MG91 effectors
  REGION 1..535: note = Description: MG91-531 effector
  source 1..535: note = uncultivated organism sequence
MKTNSLVLSYELTLPQRIYPELDRLFSAFKWEVRGLVDELWNEEGFGLLRKAGSACSILKNAIKKPPVLPSRAYRNILELSGQIIRSHLKRKEIFDYIMDNPHLVFCNENIIARDFDTSPFFVSNIQNQIRNLFQKGKIVQKEDYFSIVKSCFSGNVVITSADDNLEKGQFRRLEIKGDKLIFEIKVPDSKGWKWIKVTKLIPNRLRKVLSRAKTVESPLIKRVFLKSGFTVYKLIIPVQIETKTKDKIEKVFAVDLSPSEKRLGTGVVVSEEGYSKPVFFSAYKMVKKLERLYRELSDLERKIDNIGNQIHRTKKNHRGILYQRLKHLFAERKLRWKKFKELRKQVLEVFINLIIEHAKTYSCDAIAIENLKFKALPDWNSKKFRRHFSLWFYSKFEKRLKHKALRSGLRVIKVNPYRSSRRCHICGYEGKTNRLEFICSKCQKRFDRDYNAAINIGIKALAVYRTKSEPYMGKDIPGSSPFPQVPVHQILPFKFKSLLFTVSFLKLLSYLRVVETSYLKFGKLTGWISLDKCS

SEQ ID NO: 3340 - protein, 524 aa, unidentified
  REGION 1..524: note = Category: MG91 effectors
  REGION 1..524: note = Description: MG91-532 effector
  source 1..524: note = uncultivated organism sequence
MEEVFVLELPLQVEKYQADILNKRYEQLRQLYNYVQGKLLRQYKYFEQMSEFQACKTIREKRDFFRSHPFHINGHLAGDKELPEITFDEYGIKGFVEKLAQKSVGPNMTYADLGFTTYILDHLGASIWSAWDKKLYDYRAKRISFKKYGEQDSFSSRRKVVRGKVYFSGLELHLDTMELAIKLNGKVGKEAKFVTLRILHNPKHADYEMWALKGGLDSVKVVKVVRRFVRGQYKYYVQLSIESEKPQKGRTLGKGNVGIDIGPTTVAVSGENIACIDKLASNCDNIQEEITRLARKIDRSRRANNPQNFNEDGTIKRGVRLVWNDSKRYKALRREMAELQRRQAAIRKQQHIDRANELLKEGDTFIVENNQISGWTRKAKETKVNEKTGKIQKKKRFGKSVANHAPAMFVTILENKVKSLGGEVVKVDTQNAASQYDFTNGEFTKHELGERTVTLSNGDTHQRDMLAAFNLQHLKYDAPEKKQYDTKAMAQHYERFCELEQEEIMRYKNKEKKDDHSTIGAEKL

SEQ ID NO: 3341 - protein, 467 aa, unidentified
  REGION 1..467: note = Category: MG91 effectors
  REGION 1..467: note = Description: MG91-533 effector
  source 1..467: note = uncultivated organism sequence
MGSCSENARHGRVADRKSHADVASGRGHLLGINECQKLASRAWISVERHLYNGGAPRFISSRRGLHSIEGKTNRTGIIWKADQQCVTVCKHVYRVRVDKRDDWLTRALQDPTDPTKPRKVKYCRIVREMRKGKERFFLQLVAEGSSPLKHAYAGKDLRMAIDPGLGSLTYATEDGTIAKVQIAPSADTDHRAVRKLQRAMERSRQATNPDNYETVEVVRHGKKHKSLKVKSGRLQWRFSKRYEKLRSELAEMLRLCAATRKREHGEVCNWLLGHAGHIIVEDNSYKAFQRGRFGKTIGRHAPAALYAQLTNKAESAGLLVEVVSPKKLKPTQHNLLTGQFVKHELWERRVRLGNEDDDRWIDRDAAACLNLLYADLEKQTYAPERIREAVPAGVTARLDAGVVVIQAREGITDREFGRFRRRGIPSLTVQGLRQQGFRGRSDSKSGATPRRKASTVSKPSHFSGEVV

SEQ ID NO: 3342 - protein, 524 aa, unidentified
  REGION 1..524: note = Category: MG91 effectors
  REGION 1..524: note = Description: MG91-534 effector
  source 1..524: note = uncultivated organism sequence
MNEVFVLELPLQVEKYQADVLNKRYEQLRQLYNYVQGKLLRQYRYFEQMKEFQACKTIKEKRDFFRSHPFQINETLKGNKIPFMVSFDEYSIKGFVEKLAQKPVGANMTFADLGFTTYILDHLGASIWAAWDKMLYDFKAKRISFKKYGELDSFSSRRKLVGGKVYFSGMEVHLDTMELAIKMNGKVGKEAKFITLKILHNPKHADYELWALKGGVNSVKVVKVVRRLVRSQYKYYVQLTIEGEKPQKSRRLGKGNVGIDLGPTTVAVSGVNVVSIDKLASKCDDIQEEITRLSRRIDRSRRANNPQNFNENGTIKRGIKLVWNDSNRYKELRRELAELRRKQAAIRKQQHIERANALLKEGDTFIVENNPISSWTTRAKETKVNEKTGKIQKKKRFGKSVANHAPSMFVSILENKVKSLGGDLVKVDTKNAASQYDFTNNSFTKHELKERNVTLSNGDTHQRDMLAAFNLQHLQYDEKDDKQYDTEAMTADYERFCQLEQEEILRYKNKEKKDDRGTIGAEKL

SEQ ID NO: 3343 - protein, 1358 aa, unidentified
  REGION 1..1358: note = Category: MG91 effectors
  REGION 1..1358: note = Description: MG91-535 effector
  source 1..1358: note = uncultivated organism sequence
MEKEYYLGLDMGTNSVGWAVTDDAYNLIRFKGKDMWGIREFDEANPAVERRTHRTSRRREQRNAVRMGLIRSYFADEIQKVDSNFYQRLDNSFFHVEDKQDNVKDKNGIFNDKNYKDADYYKQYPTIFHLRKELIEDASQKDVRLVYLAVANMFKHRGHFLLSGIGSESSKQTITDLYNQVTGLITEEYGISLKTDIAGTDFEQVLCSREYSRTRKSEKVCEILEIKNSDKLKKAFVKSMCGLSVKITDIIDDTFTEISDEDKKITFSFVDSDYDEKAGVLEEKLGTDVYDIISKLKEIHDKAQVAEIMKNYQYLSFARVADYEKHKKDLKILKRVVKKYFEPTVYDKLFRSEENGTYSAYVNSFNSEEKSRRNYKERKQEDLYNSIKKLLKSVDNVDDTDIEYIKNEMDKENFLPKQLTFKNGVIPNQIHASELKAILKNAEKYLPFLNEKDESGYTVSERILMLFSFQIPYYVGPVSSNSNGWVKRLEPGQVLPWNIDKKIDLKETSEQFIQRMVRNCTYIAGEKVLPKDSLLYENFKVLNEINNLSINGERITVNLKQDLYNTLFLKGKRVTRKQIFNYFHSRGLVEEDSQISGIDIAVNNSLSTYGKFLPLFGEHLKEDKYKKMVDDIVFWCTVYGDSRKFLREQLEEKYSDVLDENQIKRITGMKFKDWGNLSKEFLELSGCCKSTGEVMPLIRAMWETNYNLMELLHSEEFTYSEELEEKQGKIEKVLSEYTIDDLNEEYFSAPVKRMVWQTLLIIKEIEKIMKCPPTRIFVEMTRKDDEKGDNGRKSSRKDQLLALYKKIQSEDKEWKKEMSSRIEDYDKKGALRSKKLYLYFIQKGLDMYTGKPIDLDNLMSANSNYDIDHIYPRHFVKDDNINNNLVLASKPANAEKSDIYPIKDSIYQKMKYTWKVLRDEGLITEEKYKRLTGRNPFTDEQKAGFIARQLVETGQGTKGVADLLTALLPDTKLVYSKAGNVSDFRKRYDIPKSRLINDFHHAHDAYLNIVVGNIYFTKFTSNPLNYIRKECSSKDNKYQYNLGNMYKWDVKRDGKTAWVAPEEGETGTLATVKKMLSRNTPILTRLTIEGHGGIADATLYSHKKAKQDTYIPLKSSDARMADVTKYGGYSSVTTAYLFLVEHEIKGKKIRTLETVPIYLKDRLENSKEKLEEYCRETLGYTNPSVRMKKIKLQSLIKLNGYYMQISGRTGNRFTLRNYVQLCLNGKWVDYIHKLEKYQDKGVIDDLITDERNVELYNVLCEKHSVGIFTLRPNLVGDKIKNGYDKFVNLTTEEQIKLLIEIIKLTCVGIVSANLTLIGGAAISGKMLMSKNITDANECILINQSVTGLYENRIDLLRV

SEQ ID NO: 3344 - protein, 1352 aa, unidentified
  REGION 1..1352: note = Category: MG91 effectors
  REGION 1..1352: note = Description: MG91-536 effector
  source 1..1352: note = uncultivated organism sequence
MTAFKYYLGLDMGTNSVGWAATDPEYRLLKAKGKDLWGIREFNEASGAVERRTHRISRRRRQREQVRIGILKDYFHDAICEVDPSFFRRLENSKYHEEDKDVEVRYKNNIFNDGNYTDKDYFNEYPTIYHLRNELISSTEKHDVRLVFLALLNMFKHRGHFLNAGLGENNGESNIDNAYFELTELLSELTEYHLSQDIDCKQIEAILSRRDMSRTHKAEELAGVLHVDLKNKPYKELIRGLCGLKFNACVVFPDVQSEEVTKLDICLSESTFDEKSDEIANIIGEDYFEIIMAMKEMFDIGSLASIMKGHNYLSQARVASYTKHKEDLKLLKEVIKKYCGKKEYDKFFNSDADGSYASYVGSYNSKNKERRVGNKRTSEELYKEIKKLLKDAQKEDENVQKILTSIENETFLPKQLTASNGVIPNQVHAREMKKILSNAENYLPFLTEKDETGLSVSERILKLFTFQIPYYIGPTSENSGKNGGNGWVVRREDGQVLPWNIDEKIDMKATSEAFISRMVRRCTYISGEQVLPKASLEYQSYCVLNEINNIKIDGERISVELKQDIYKAVFQKGKKVTKKQLCKYLHTRGIIETEEQVTGVDVSINNALTTYGKFKPIFGEDISKDSVQKMIEDIVFWCTVYGDSKKFLKDRIEEKYGNKLSEEQIKRILGFKFKDWGNLSKKFLELNGADTSTGESISIIRALWNNNLNLMELINSSLYNYKECLAEYQNTMLKTLSEIEAEDLNEYYFSAPVRRMIWQTILVIKELVKVLGCEPERIFVEMTRKPDEHKTRTSSRRNKFEELYKKVKDETTDWMQVIANAEEDGKIRSKKMYLYLTQKGRCMYTGKHIELDDLFDNNLYDIDHIYPRHFVKDDNIDNNLVLVCKEKNAHKSDHYPIEEEIFLSQKKMWLELRKSGFITEEKYNRLMDRNPFSDEQKAGFIARQLVETSQGTKGVANILRQLLPGSKIVYAKASNVSEFRHTRDGIPKSRLVNDFHHAHDAYLNIVVGNVYYMKFTQNPLNFIKKDYDNYKEDYNLSKMFDWDVKRNGEVAWIAQRKDGEAGTITTVKKMLSRNTPLMTRYSFEGKGGLANETLYSAKKAKGEGYIPFKSSDDKMQDVTKYGGFTSVTGAYFFLVEHTEKKKRIRTIESVPVYLAQKIEQNPDELKKYCEEILGLIDADIRLKKIKIGSLIKRNGYFCYITGKTGKQLIVRNAVNLCLKNEWIKYISKLEKVKEKDAVDKIITKEKNEVLYSELIQKFKHGIFSKRPNPVGDKLEKGSEKFSNLSIKEQCAVLCQILQLAAVLGSECDMTLLGESAHCGKMLISKKIGDEEIYLINQSITGLYEKKINLHTV

SEQ ID NO: 3345 - protein, 510 aa, unidentified
  REGION 1..510: note = Category: MG91 effectors
  REGION 1..510: note = Description: MG91-537 effector
  source 1..510: note = uncultivated organism sequence
MREQVLSYELTLPQRIYSHLDRLFSVFKNQVNSYIPRLWNEKGFELLSQKGSAMGILKEVFSTPQGLPSRVFRNVLELTGQIVRSQIKRKEIFESLLKGEEVTGYDENFLLNVKRQLEKLKKKGKEVNSYFDFPYPKFNGQVVITSADDNLEKGQFKRLRISGSFLEFSIKVPTQDGWKWIKVRKLLPNRLRKALLKAKKIEAPLIKKQRLKSGYTVYRLVIPLSFEVTEPKEIDRVLALDLSSQEKRLGVAVIMDKEFVSKPIFFKTELIRKVERIYKETCNLERKIDDVYNAIRNTGSRKVKQELAKRLNHLFGEQKRKQRKCKELRKQILENFTNFVIAHAKAYHCQVIAIENLAFKEVPNWQSSKALRLFTQWFYSRFTKRLEEKARVSGLKVLKINPANTSRICAKCGKEGRLEKLTFECSCGTYDRDYNASLNVAQRALRLTKSRAYTVRDIPGRIPSRLVRAEGLALLTVISLFKLLAWLKVVQTCYLKPQNLIRWINSDKYD

SEQ ID NO: 3346 - protein, 528 aa, unidentified
  REGION 1..528: note = Category: MG91 effectors
  REGION 1..528: note = Description: MG91-538 effector
  source 1..528: note = uncultivated organism sequence
MNEVFVLELPLQVEKYQADVLNKRYEQLRQLYNYVQGKLLRQYRYFEQMKEFQACKTIKEKRDFFRSHPFQINETLKGNKIPFMVSFDEYSIKGFVEKLAQKPVGANMTFADLGFTTYILDHLGASIWAAWDKMLYDFKAKRISFKKYGELDSFSSRRKLVGGKVYFSGMEVHLDTMELAIKMNGKVGKEAKFITLKILHNPNHADYELWALKGGVNSVKVVKVVRRLVRSQYKYYVQLTIEGEKPQKSRRLGKGNVGIDLGPTTVAVSGVNVVSIDKLASKCDNIQEEITQLSRKIDRSRRANNPQNFNEDGTIKRGIKLVWNDSNRYKELRRKLAELRRKQAAIRKQQHIERANALLKEGDTFIVENNPVDAWVRRAKETKVDEKTGKYKSKRGSGRSVGNHAPAMFVDILENKVKSLGGRFERVNTQNAASQYDFTTDSFKTGEEKHKLNERAITLSNGDTHQRDMLAAFNLQHLKLDEAKTKQYDTEAMAADYERFCQLEQEEILRYKNKVKKDDRGTIGAEKL

SEQ ID NO: 3347 - protein, 497 aa, unidentified
  REGION 1..497: note = Category: MG91 effectors
  REGION 1..497: note = Description: MG91-539 effector
  source 1..497: note = uncultivated organism sequence
MPSPTFIIELPIRVSDSESRTILRKLEFARQLHNATLGTALGKLQQLRQDSEWKRACLMPKGKERSELFRKLDRKYQLTEYDLHTVIAKHRQRSGRKTELGINETQKIATRVFQAVNRYKLGLGGRPRFKSLSRGLRSIEGKSNKTGLKFNIEKSVLSWCKHDYRVFIDPQDDFLQRALRSEGRSGFKKVKYCRLVRKTIKGKNRFYLQVVLEGQAPIKHIYASTSERLSIDPGPQTIAVFSDVWAGKIKVSPTAQVDEKRLRCIQRSMDRSLKKSNPDCYESDGTLRKGCVLKKTKGYEKRIQRLQECHRKAAATRRCEHGQLINLLLSMAGDIRVEKNQWKAFQRGHFGKSLGKSGISGFIERLKSKAESAGLKVTEVKPYKLKLSQYDPYTDQYRKKSLNERWHSLGESSEWIQRDVMSALLLQCADLEEEKHIPTEVIKTLEGVKQLLRDAGYVILKPSSNGESNPTFASEPKAVTPEKVRLEIFCGASDSYL

SEQ ID NO: 3348 - protein, 1353 aa, unidentified
  REGION 1..1353: note = Category: MG91 effectors
  REGION 1..1353: note = Description: MG91-540 effector
  source 1..1353: note = uncultivated organism sequence
MEQKTYYLGLDMGTNSVGWAVTDENYNLLRAKGKDLWGIREFESASGAIERRAHRVSRRNRQRQQVRVGKLNCYFEDAINEVDPNFYARLRNSKYHLEDKEEAVRTPNGIFNDPAYKDKDYYAQYPTIYHLRKELLTNDEPHDVRLVYLALLNMFKHRGHFLNAALTSEGTRHMQDAYNSFQENVYEMCDLSFPDVDGKEIEAVLSNRDLNRSRKSEALMELFHFTKKENKTELEFVKGMCGLTTEASKLFGDLGLEEKVEICFSKASYEDRIPDIMDAVGEENFRVLENLKEIADIGTLAGVLKGYTYLSEARVAEYEKHKSDLKLLKSVIRQYGTQEDYNKMFRSEESGTYSAYVNSYNSGKKQRRDMKGRTREDFYKSLKKLLKGMPEEDENVAQILAEIDKEKFLPKQLTASNGVIPNQVHLKEMKAILRNAEQYLPFLKEVDESGLTTSERIWRLFSFQIPYYVGPVTPNSSRDGGNGWVVRKEEGEVLPWNINEKIDLPATQDAFIKRLVRECTYISGEKVLPKGALIYEKFAVLNEINNIRIDNERLDTPLKQAIYNDLFCTGKRITRKKILDYLSAQGKLKNESQLTGIDKNINNSLSSYGKFLGVFGEDLKKDHYIDMSEDIIYWCTVYGDSKKVLRSLLEEKYQGELTEKQMKRILGFKFGDWGRMSREFLELEGIDKETGEVVTLIHAMWDNSMNMMELIHSDRFTFAESLESKKTKMDKTLSEFKHEDLDEYYFSAPVKRMIWQTLLVIKELEKVLGGPPTRLFVEMTRSDDVKGDKGRKKSRKDELLELYKKVKDESHDWTAIINAADENGTIRSKKMYLYLTQRGRCMYTGKPIDLNQLFDNNIYDIDHIYPRHFVKDDNLRNNLVLVDKRANARKSDNYPIESNIRCNDSIKALWYSLKKEKLISEEKYRRLTGSNPFSDEQKAGFIARQMVETSQATKGVNDLLKQLLPETELVYSKASNVSDFRRDYDLLKSRTINDFHHANDAYLNIVVGNVFLVKFTNNPRNFIKEYNRDKYTYGYNLGRIFERDVKRGDQVAWIADDRNGNHGTIETVKKMMAKHTPLLTRMNFVNNGQISKGTLYSKFKAKPDTYIPLKETDEKMRDISKYGGFTNVSTAYFFLVEHGKANKRIRTIEAVPIYMKSRLENNEEELKKYCVEQLGLLDPSIRLNKIKIQSQFRINGFYVFFRGKTGHELLWGNNTSLCLEPKWNNYISYLDKYAKNGYMNRFITKEENEHLYSELLKKHSEAIFSKRPNSFSKIVIAGQEKFKDLDIEKQCVALSQLISATSIGSSIADVTMIGGTAQTGRMRTNKKISGYELVLINTSATGLYKTEIDLNKI

SEQ ID NO: 3349 - protein, 530 aa, unidentified
  REGION 1..530: note = Category: MG91 effectors
  REGION 1..530: note = Description: MG91-541 effector
  source 1..530: note = uncultivated organism sequence
MTSPSFVIELPIAVDDAEMRTIVRKLEFARQLHNATLGTAMGQLQLMRQDAAWKEACVMPKGKERAAAFRALDRKYGLTEYDLHSVIARHREGTGRKAELGINETQKIATRVFQAINRYKLGLGGMPRFKSFKRGLHSIEGKTNKTGLKFKPEQKVLNWCGHDYRVLIDPKDNYIQRALKDNERSDQYRKIKYCRLVRRRIRSADRFFLQVVLEGTAPVKHVYAPVTERAAIDPGPQSIALFSKAFAGKIQVAGSNNFNEAASRRLLRAMDRSLRRNNPDAYNENGTIKKGAKLVKSKNYQRKVDRLREMHRVAAAERKCRHGQTINLLLSIAGDIRIEKNSWKAFQKGHFGKSLGKSAMSGFIAQLKSKAASAGLKVTEVNPYKLKLSQYDPYTDTYRKKDLSERWQEMKAGSGQYIQRDVLSALLLYCANIEKEIHIPKVAVEQLEGAKQFLTDAGYVVLKSTSSRDQRDPRLASEPKAMTPEMARQKILRGAGDSHLPTDQELGRIRAGGKVSTWSKETFPLQRGVV

SEQ ID NO: 3350 - protein, 530 aa, unidentified
  REGION 1..530: note = Category: MG91 effectors
  REGION 1..530: note = Description: MG91-542 effector
  source 1..530: note = uncultivated organism sequence
MTYQSFVIELPIAVDDAEMRTIVRKLEFARQLHNATLGTAMGQLQQMRQDAAWKEACVMPKGKERAAAFRALDRKYGLTEYDLHSVIARHREGSGRKAELGINETQKIATRVFQAINRYKLGLGGMPRFKSSKRGLHSIEGKTNKTGLKFRPEKKVLNWCGHDYRVLIDPKDDYIQRALKENERSDKYRKIKYCRLVRKRIRSSDRFFLQVVLEGTAPVKHVYAPVTKRAAIDPGPQSIALFSKAFAGKIQVAGSNNFNEAASRRLLRAMDRSLRRNNPDAYNENGTIKKGAKLVKSKNYQRKVDRLREMHRVAAAERKCRHGQTINLLLSIAGDIRIEKNSWKAFQRGHFGKSLGKSAMSGFIAQLKSKAASAGLKITEVNPYKLRLSQYDPYTDTYRKKDLSERWQEMKAGSGLYIQRDVLSALLLYCADIEKEIHIPKVAVEQLEGAKQFLTDAGYVVLKSTSSRDQRDPRLASEPKAMTPEMARQKILRGAGDSHLPTDQELGQIRAGGKVSTWSKETFPLQRGVV

SEQ ID NO: 3351 - protein, 607 aa, unidentified
  REGION 1..607: note = Category: MG91 effectors
  REGION 1..607: note = Description: MG91-543 effector
  source 1..607: note = uncultivated organism sequence
MAKEEFVLTLPLKVEKWQADILDKRYEMLRQVYNMVQQKLVRQYIYFSQQKAYRDCKNFEQRREFFANNPFHIKGVKGKNDELCDIKFPYTFKSRGGTSGKRVPNGISDYVSKLWSHKIGQDKTLADFGINSYIMEELGLHIMKAWEDRLYKPRSKRVSFKDYGEINSLGSRNKNGNIAGFTINLDEGYITYKTNGRLGQFADFIQLPIDFSREKNGYAKEALKGGIDSLKKLLIVKRCVRGENKYYLQLTISGEKPQKGRTLGKGNVGIDIGPSTIATSSLKGVHFDKLADKCDNIEHELYLINRKLDRSRRANNPQNYNEDGKIKRGIRLVWKKDKDVKRYATLKQQRKELYRKQAEIRKQQHLEMANAMLSQGDTFIVENNPVDAWVRRAKETTKTKTGKNRCKKRYGKSVANHAPSMFVSILKNKVLSLGGKFYEIDPRNAATQFDFTNGEFTKHEVCERSITLSNGCTHQRDMLSAFNLQHIVLQSKELKEYDIEQMKADYPIFCRLESSEQERFRIAWHNERDALYFVGASEKQMRRQPQEKSVANRHNGVVGRKYCNTSLEGENAKITGSGLVRESIERVSQIPDECHPFGGAPIVLDGL

SEQ ID NO: 3352 - protein, 601 aa, unidentified
  REGION 1..601: note = Category: MG91 effectors
  REGION 1..601: note = Description: MG91-544 effector
  source 1..601: note = uncultivated organism sequence
MIEEFVLTLPLKVEKWQADILNNRYEHLRRIYNMVQRKLLRQYIYYSQQSEYRKCKSNDEKRDFWENHPFTIKGIYDQKGNSSIVKFPYTYSSRSKNSGKRASNGISDLLPKLKHYNIGGGKTYGSLGLNASILENLGLSVQQAWEKRIYNSKSKHISFKKEDELNTFGCREKDGFSGFVLDLSKMELSFNTNGLHGKKAEFIHLPINPNKKFTQYEVEALKGGPESVRKIVISREYIRGAYKYYVQLTIRGEKPQKNRTLGKGTVGIDVGPSTVAVSSLYGVALNKLADKCDGIEHDLWLVNRKMDRSRRATNPDFFAEDGTYIKRKKGERRIWNFSNRYKNLKSVRRELYRRQAVVRKQQHIAMANEMLSQGDTFIVENNPVDSWTRRAKETKKNKKGKMRCKRRFGKSVAHHAPAMFVSILQNKVRSLGGEFHKVDIKIAATQFDFTNGEYKKHELKERTVTLADGKTHQRDMMAAFNLQHFRADSSEDYDIEQMILDYPVFCKLEEQGIANYIESKGEEKDTAYFAGKSSKELKRSSNRHNGGVERKHCNIHERKGDAAESGKKTLFGGISESLESVPDVPNECHHLGHQHLRLDEP

SEQ ID NO: 3353 - protein, 448 aa, unidentified
  REGION 1..448: note = Category: MG91 effectors
  REGION 1..448: note = Description: MG91-545 effector
  source 1..448: note = uncultivated organism sequence
MKTAATPSFVAELPLRVGADVEALLERTFDFARNLYNATLGTVLGRYQALRESQAWQLARAVPKKEAGEVFNRLMRQAELTKSGFEKILNKHRHSSGRAEQLDSNSGQKIADRLWDAFMRYRTRQGGKPRFKSERRGIHSIEGKTNTTGFRWKAQEGCVRWGKRRLPVIVNKQDDWLMRALADPVDPSKPRRVKCYRILWRKFGGRKRWFVQLVCEGVSPVKHIFAPTELKAGIDPSTKSMTVAYACGTVEKIDLATPLKKADREIRLLQRKLDRSRRATNKDNYNEDKTVKKGASGWVYSKHYEKIRTVYADAQRRAAAHRKCVCNEAVNWVLGQAGCIIVEKNNFKAFQKSRYGKSISKAAPGQFVTNLNVKAVSAGLKVFIVPPYELRPSQHDIETGQYVRHELCERWVKLGQSGLWLNRDALAALNLLWLDDAATRYSAARRSE

SEQ ID NO: 3354 - protein, 519 aa, unidentified
  REGION 1..519: note = Category: MG91 effectors
  REGION 1..519: note = Description: MG91-546 effector
  source 1..519: note = uncultivated organism sequence
MTSQTFILELPIKADDSQSRTIAKKFEYGRMLYNATLGSGLGRLTQMRQDPEWRRACEMSKGKERNELFRRLNRKYRLTEYDFHADIARHREGTKRKSELGINEAQKLATQAFSAVSRYMYKQGGRPRFKSFKRGLHSLEGKTNKTGLKFRPEKMLLDWCRKSYQVMLDSDDAFILDALYADKERTHFKRIKYNRIVCRNIKGVKRFYLQVVLEGTPPVKHAYAPATERMAIDPGPKSFAVFCPRVQAKVQVAPGAKVNEKAIRRIQRSMDRSLRASNPKAFDEKGRIKSGVGLTYSKGYQARVDKLREAHRRATGTRKCEHGELANLLLECAGNIRIEKNSWEAFKRSHFGRSINNSAASGFIQRLKSKAERAGLTVEEVSPYRLKPSQYDPYKDEFMKKALGERWMYLGDETTVIQRDIMSAILIYFADLKNQTHNPEVVKAALEGLKRGLTDAGYVKQLKLPRSSGSQDPLFAPEPKALTTEELRSKCFRAGSDRHSSTLNGTDGKAVGWSETFPL

SEQ ID NO: 3355 - protein, 1353 aa, unidentified
  REGION 1..1353: note = Category: MG91 effectors
  REGION 1..1353: note = Description: MG91-547 effector
  source 1..1353: note = uncultivated organism sequence
MEQKTYYLGLDMGTNSVGWAVTDENYNLLRAKGKDLWGIREFESASGAIERRAHRVSRRNRQRQQVRVGKLNCYFEDAINEVDPNFYARLRNSKYHLEDKEEAVRTPNGIFNDPDYKDKDYYAQYPTIYHLRKELLTNDEPHDVRLVYLALLNMFKHRGHFLNAALTSEGTRHMQDAYNSFQENVYEMCDLSFPDVDGKEIEAVLSNRDLNRSRKSEALMELFHFTKKENKTESEFVKGMCGLTTEASKLFGNLGLEEKVEICFSKASYEDRIPDIMDAVGEENFRVLENLKEIADIGTLAGVLKGYTYLSEARVAEYEKHKSDLKLLKSVIRQYGTQEDYNKMFRSEESGTYSAYVNSYNSGKKQRRDMKGRTREDFYKSLKKLLKGMPEEDENVTYILAEIDKEKFLPKHLTASNGVIPNQVHLKEMKTILRNAEQYLPFLKEVDESGLTTSERIWRLFSFQIPYYVGPVTPNSSRDGGNGWVVRKEEGEILPWNINEKIDLPATQDAFIKRLVRECTYISGEKVLPKGALIYEKFAVLNEINNIRIDNERLDTPLKQAIYNDLFCTGKRITRKKILDYLSAQGKLKNESQLTGIDKNINNSLSSYGKFLGVFGEDLKKDHYIDMSEDIIYWCTVYGDSKKVLRSLLEEKYQGELTEKQMKRILGFKFGDWGRMSREFLELEGIDKETGEVVTLIHAMWENSMNMMELIHSDRFTFAESLESKKTKMDKTLSKFKHEDLDEYYFSAPVKRMIWQTLLVIKELEKVLGGPPTRLFVEMTRSDDVKGDKGRKKSRKDELLDLYKKVKDESHDWSAIINAADENGTIRSKKMYLYLTQRGRCMYTGKPIDLNQLFDNNIYDIDHIYPRHFVKDDNLRNNLVLVDKRANARKSDNYPIDSNIRCNDSIKALWYSLKKEKLISEEKYRRLTGSNPFSDEQKAGFIARQMVETSQATKGVNDLLKQLLPETELVYSKASNVSDFRRDYNLLKSRTINDFHHANDAYLNIVVGNVFLVKFTNNPRNFIKEYNRDKYTYGYNLGKIFERDVKRGNEVAWIADDRNGNHGTIETVKKMMAKNTPLLTRMNFVNNGQITKGTLYSKSKAKQDTYIPLKESDEKMRDISKYGGFTNVSTAYFFLVEHGKANKRIRTIEAVPIYLKSRLENNDEALKNYCVEKLGLMDPSIRLDKIKIQSQFRVNGFYVFFRGKTGHRLIWGNNTSLCLEPKWNNYISYLEKFEKNGNMNRFVTKEENEHLYSELLKKHSQAIFSKRPNSFSKIVIAGQEKFKDFDIEKQCVALSQLISATSIGSSIADMTMIGGTARTGYMLTNQKISGYELVLINTSPTGLNKTEIDLNTI

SEQ ID NO: 3356 - protein, 514 aa, unidentified
  REGION 1..514: note = Category: MG91 effectors
  REGION 1..514: note = Description: MG91-548 effector
  source 1..514: note = uncultivated organism sequence
MNNETFIMELPLIVEKFQSDELDKRFEILRRIYNMAQNKLERQFCYLSKFKEYQECTTKKAKGEFIKKHPFSFKDILDKSGNPLMITFTKYDIQGYLSKFAKLKIDSQYTYSDMGINTPMLMHMGMAIWSAWEKVIFDSKADKISYKKYGDLKSIGVDWEPKHPAGFILDLQKGELKLNLNNRQGQYARYITMKIRFGRKEHQVWYEGDALNAGEDSIRVLTIVRRKIRGRYNYYLQMTIRNNKPQKGRTLGEGRVAIDLGTSKIAVVTKDKVHLLPLSPSILSISDELRIIQRQMDRSRRANNPQKFNEDGSIKKGNHDKWVNSKEYIRLRNMKAELERKQAAVRKQDHIALANYLLSLGNEFVIEDNDVQEWVKRKKEEKRRKSDGKNLSKAGLGKQVGNHAPSMFVTILKNKVESLGGTFVRVDNNNRATDYDFTNNTFNEHKLEERYITLGNGNRHQRDTLAAFNLYHLDTAPEKEKCYHLYEMRKHYAQFCESEKEALLRWKGMTPKRE

SEQ ID NO: 3357 - protein, 422 aa, unidentified
  REGION 1..422: note = Category: MG91 effectors
  REGION 1..422: note = Description: MG91-549 effector
  source 1..422: note = uncultivated organism sequence
MERHLYNGGSPRFISSRRGLHSIEGKTNRTGIIWKADQQCVTVCKRVYRVRVDKRDDWLTRALQDPTDPTKPRRVKYCRIVREMRKGKERFLLQLVAEGTSPLKHAYAGKDLRMAIDPGLGSLTYATEDGTIAKVQIAPSADTDHRAVRKLQRAMERSRQATNPDNYETVEVVRHGKKHKSLKVKSGRLQWRFSKRYESLRAELAEIFRLSAATRKREHGEVCNWLLGHAGHIIVEDNSYKAFQRGRFGKTIGRHAPAALYAQLTNKAESAGLLVEVVSPKKLKPTQHNLLTGQFVKHELWERRVRLGNDDDDRWIDRDAAACLNLLYADLEKQTYAPERIREAVLAGVTAWLDAGVVVIQAREGITEREFGRFRRRGIPSLTVQGLRQQGFRGRSDSKSGTTPRRKASTVSKPSHFSGEVV

SEQ ID NO: 3358 - protein, 524 aa, unidentified
  REGION 1..524: note = Category: MG91 effectors
  REGION 1..524: note = Description: MG91-550 effector
  source 1..524: note = uncultivated organism sequence
MNEVFVLELPLQVEKYQADILNKRYEQLRQLYNYVQGKLLRQYRYFEQMKEYQACKTIKEKRDFFKSHPFQINETLKGNKTPFTVSFDEYSIKGFIEKLVQKQVGPNMTYADLGFTTYILDHLGASVWAAWDKKLYDFKAKRISFKKYGELDSFSSRRKVVGGKVYFSGMELHLDTMELSIKMNGKQGNNAKFITLKMLHNPKHAEYEIWALKGGVDSVKVVKVVRRLVRTQYKYYVQLTIEGEKPQKGRTLGKGNVGIDLGPTTVAVSGEHIVSIDKLASKCDNIQEEITRLSRKIDRSRRANNPQNFNEDGTIKRGIKLVWNDSKRYKEMRRELAELRRKQAAIRKQQHIERANALLKEGDTFIVENNQISSWTTRAKETKVNEKTGKIQKKKRFGKSVANHAPSMFVSILENKVKSLGGEVVKVDTKNAASQYDFTDNSFTKHELKERNVTLSNGDTHQRDMLAAFNLQHLKYNEPEAKQYDTEAMVADYDRFCQLEQEEIQRYKNKEKKDDRSTVGAEKL

SEQ ID NO: 3359 - protein, 607 aa, unidentified
  REGION 1..607: note = Category: MG91 effectors
  REGION 1..607: note = Description: MG91-551 effector
  source 1..607: note = uncultivated organism sequence
MIEEFVLTLPLKVETWQADILNKRYEHLRCIYNMVQRKLLRHYIYLSQQNEYRQCKDNDEKRTFWENHPITFKDFCDKNGNPAIVKFPYTYSHRSKDSGKKASNGISDFVPKFKNRNIGGGLTYGSLGINASILENLGLRIEQAWKKRLYDPKSKHISFKEEGDLNTLGCREKDGFSGFVLDLQKMMLSFNTNGRRHGSAEYIHLPIKPSKLTKYEKFVIDALKDKLSSVRKIVVAREYVRGKYKYYVQLTIKGEKPQKNRTLGKGTVGIDVGPSTVAVSSLQGVSLDKLADKCDNIEHDLWHINRKMDRSKRDTNPDFFNEDKTYKKPEKGERRKWTFSNRYKRLKLERRELYRKQAAIRKQQHIEMANALLSQGDEFIVENNPIDSWAKRAKETKRGKNGKIRCKRRFGKSVAHHAPAMFVSILQNKVRSLGGSFHKVEIKNAATQFDFTNGEFTKHELNERTVTLSNGRTHQRDMLSAFNLQHLRPDSEETKNYNIEQMEADYPVFCKLEEKGIAQFKEKRQQERDVAYFTGVSHKTLKFSSANRHNGGVGRGNCNYHAGSKRNVAKTGNKSSSKENCESMETVSLVPNEYHHSNHQHLRLDGL

SEQ ID NO: 3360 - protein, 342 aa, unidentified
  REGION 1..342: note = Category: MG91 effectors
  REGION 1..342: note = Description: MG91-552 effector
  source 1..342: note = uncultivated organism sequence
MRAAFSFCAIAETLGSEIVVENDNVTVKPNNARSKEILQACVIDGLKIQYDEMRHWIKELYPSLMSSCTSKIGYVIGKMMTMKDQDIKKCQKKFLIVNGKRAFAQFNRSGIPLKSGMAKIDGHLLKCRWDKDIGEVEFTTNKMDSSTYYAFSSLREARDGWNIKDSYLSFDEDKNKIIVILSYERPDTPSKVNADKVMYVEFTDDKEKFITCYTDNKWSARPFSAAGIVGYLEEMERIYSRYWSEFKSYERREIKQRKHVKEKLNRYTERRANAEKNNNHLWSKRIVDFSRQQCAGKLFVVNLPEKTLFDLPYGWFDLKTKLDYKMKEIGGTVSFVSVDKDK

SEQ ID NO: 3361 - protein, 537 aa, unidentified
  REGION 1..537: note = Category: MG91 effectors
  REGION 1..537: note = Description: MG91-553 effector
  source 1..537: note = uncultivated organism sequence
MSTKSFIISLPIITGDQDRRRLQKSFSFGCNLQNAVMGGGWDRVLKMRATAEWQTARAMPKSSERTKAFRDLRVHFRLSEYDFHADVAKHRKASGRCHLLGINESQKLASRAWISVERHLYNGGSPRFISSRRGLHSIEGKTNRTGIIWKADQQCVTVCKRVYRVRVDKRDDWLTRALQDQTDPTKPRKVKYCRIVREMRKGKERFLLQLVAEGTSPLKHAYAGKDLRMAIDPGLGSLTYATEDGTIAKVQIAPSADTDHRAVRKLQRAMERSRQATNPDNYETVEVVRHGKKHKSLKVKSGRLQWRFSKRYESLRAELAEIFRLSAATRKREHGEVCNWLLGHAGHIIVEDNSYKAFQRGRFGKTIGRHAPAALYAQLTNKAESAGLLVEVVSPKKLKPTQHNLLTGQFVKHELWERRVRLGNDDDGRWIDRDAAACLNLLYADLEKQTYAPERICEAVLAGVTAWLDAGVVVIQAREGITEREFGRFRRRGIPSLTVQGLRQQGFRGRSDSKSGTTPRRKASTVSKPSHFSGEVV

SEQ ID NO: 3362 - protein, 484 aa, unidentified
  REGION 1..484: note = Category: MG91 effectors
  REGION 1..484: note = Description: MG91-554 effector
  source 1..484: note = uncultivated organism sequence
MAHKENQKAFVVTFPLHTEKWQEDRIDKMMRMLTTFYNDRQRKLVRRYIYLSHSKAYKEAKGKGVVAFKNYMKENGFSQYGLDAFFKADTKGALYQCGLNSMFLQYLSQCAWSAWDKKLFGKGDFVKTDKVVNIFCSRNMKGRFCGFDYDLSTFTIRIKSTCTKKIICTIPFVVNKNSEYELYALSQKICRIGIVRKLIRSKYKYYVQFTFDGVPYNKGRNIGTGIVGIDPGPSKIAIVSDEKVEIAKLAPGIEEDERKTARLRRKLDRSRRATNPHMYKEDGTIIKGQRQTYFSKVYNETRKQLADAQRKLAAKRKIAHNELANTLLEYGDTFKVEANSYKSMQARTKATSMTKSGRIRSKKRYGKSINNRAPSEFLVILKNKLLYYPKGKYYDVPSSYACTQFDFTNESFTEHKISERRIVTSDGIQHNRDTLAAFNIKNAIVNDTSTKKKKITKSKEFFDIVKMKASYNEFCVKERYLLSV

SEQ ID NO: 3363 - protein, 634 aa, unidentified
  REGION 1..634: note = Category: MG91 effectors
  REGION 1..634: note = Description: MG91-555 effector
  source 1..634: note = uncultivated organism sequence
MPVTSQSFVIELPIAVDDAEMRTIVRKLEFARQLHNATLGTAMGQLQQMRQDAAWKEACVMPKGKERAAAFRALDRKYGLTEYDLHSVIARHREGSGRKAELGINETQKIATRVFQAINRYKLGLGGMPRFKSSKRGLHSIEGKTNKTGLKFRQEKKVLNWCGHDYRVLIDPKDNYVQRALKENERSDQYRKIKYCRLVRKRIRSADRFFLQVVIEGTAPVKHVYAPVTERAAIDPGPQSITLFSKAFAGKIQVAGSNNFNEAVSRRLLRAMDRSLRRNNPDAYNEDGTINKGAKLAKSKNYQRKVDQLHEMHRVAAARRKCLHGQTINLLLSIAGDIRIEKNSWKAFQRGHFGKSLGKSAMSGFIAQLKSKAASAGLKVTEVNPYKLKLSQYDPYTDTYRKKDLSERWQEMKAGSGQYIQRDVLSALLLYCADIEKEIHIPKVAVEQLEGAKQFLTDAGYVVLKSTSSRDQRDPRLASEPKAMTPEMARQKILRGAGDSHLPTDQELGQIRAGGKVSTWSKETFPLQRGVVQKFDDRSEGLDMQTVYLSAGYTMGPHYFAGSIGWLNAELNGSAEGYPQDDGAAFLGALVYYYSLSKRTQLYAFTSFVDGKQLLDAGTDFNQTTGGFGLMHKF

SEQ ID NO: 3364 - protein, 532 aa, unidentified
  REGION 1..532: note = Category: MG91 effectors
  REGION 1..532: note = Description: MG91-556 effector
  source 1..532: note = uncultivated organism sequence
MSTKSFIINLPIITGDQDRRRLRKSFSFGCNLQNAVMGGGWDRVLWMRATPEWQAARVMPKGSERTKAFRDLRVQFRLSEYDFHADVAKHRKASGRSHLLGINESQKLASRAWISVERHLYNSGSPRFISSRRGLHSIEGKTNRTGIIWKADQQCVTVCKHVYRVRVDKCDDWLTRALQEPTDPTKPRKVKYCRIVREMRKGKERFLLQLVAEGTSPLKHAYAGKDQRMAIDPGLGSLTYATEDGKIAKVQIAPNADTDHRAVRRIQRAMERSRQATNPDNYETVDVVRHGKKRQSLKVKSGRLEWRFSKRYEKLRAELAQTHRLAAATRKREHGEVCNWLLGHAGTIIVEDNSFKAFQRGQFGKSIGRHAPAAFYTQLTSKAESAGLQVKVVSPKKLKPTQHNLLTGRFVKHELWERRVQLGDRTGVCWIDRDAAACVNLLYADLDQQIYDPKRIREAVLAGVTAWLDAGVVVIQAREGITEREFRRFRRRGIPSLAVQGLRQKGFRGRSDSKSGAIPEAKSLGYIETFPL

SEQ ID NO: 3365 - protein, 1358 aa, unidentified
  REGION 1..1358: note = Category: MG91 effectors
  REGION 1..1358: note = Description: MG91-557 effector
  source 1..1358: note = uncultivated organism sequence
MEKEYYLGLDMGTNSVGWAVTDDAYNLIRFKGKDMWGIREFDEANPAVERRTHRTSRRREQRNAVRMGLIRSYFADEIQKVDSNFYQRLDNSFFHVEDKQDNVKDKNGIFNDKNYKDADYYKQYPTIFHLRKELIEDASQKDVRLVYLAVANMFKHRGHFLLSGIGSESSKQTITDLYNQVSGLITEEYGISLKTDIAGTDFEQVLCSREYSRTRKSEKVCEILEIKNSDKLKKAFVKSMCGLSVKITDVIDDTFTEISDEDKKITFSFVDSDYDEKAGVLEEKLGTDVYDIISKLKEIHDKAQVAEIMKNYQYLSFARVADYEKHKKDLKILKRVVKKYFEPTVYDKLFRSGENGTYSAYVNSFNSGEKSRRNYKERKQEDLYNSIKKLLKSIDNVCDTDIEYIKNEIEKENFLPKQLTFKNGVIPNQIHASELKAILKNAEKYLPFLNEKDESGYTVSERILMLFSFQIPYYVGPVSSNSNGWVKRLEPGQVLPWNIDKKIDLKETSEQFIQRMVRNCTYIAGEKVLPKASLLYENFKVLNEINNLSINGERIAVALKQDLYNTLFLKGKRVTRKQIFNYFHSRGLVEEDSQISGIDIAVNNSLSTYGKFLPLFGEHLKEDKYKKMVDDIVFWCTVYGDSRKFLREQLEEKYSDVLDENQIKRITGMKFKDWGNLSKEFLELSGCCKSTGEMIPLIRAMWETNYNLMELLHSEEFTYSEELEEKQGKIEKVLSEYTIDDLNEEYFSAPVKRMVWQTLLIIKEIEKIMKCPPTRIFVEMTRKDDEKGDNGRKSSRKDQLLALYKKIQSEDKEWKKEMSSRIEDYDKNGALRSKKLYLYFIQKGLDMYTGKPIDLDNLMSANSNYDIDHIYPRHFVKDDNINNNLVLASKPANAEKSDIYPIKDSIYQKMKYTWKVLRDEGLITEEKYKRLTGRNPFTDEQKAGFIARQLVETGQGTKGVADLLTALLPDTKLVYSKAGNVSDFRKKYDIPKSRLINDFHHAHDAYLNIVVGNIYFTKFTSNPLNYIRKECSSKDNKYQYNLGNMYKWDVKRDGKTAWIAAKEGETGTLATVKKMLSRNTPILTRLAIEGHGGIADATLYSHKKAKQDAYIPLKSSDARMADVTKYGGYSSVTTAYLFLVEHEIKGKKIRTLETVPLYLKDRLENSKEKLEEYCRETLGYTNPSVRMKKIKLQSLIKLNGYYMQISGKTNKQFTVRNYVQFCLNSKWVDYIHKLEKYQDKGVIDDAITDEKNVELYNVLCEKHSVGIFTLRPNPVGDKIKKGYDKFVNLTTEEQIKLLIEIIKLTCVGIVSANLTLIGGASISGKMLISKNITDAKECLLINQSVTGLYENRIDLLRV

SEQ ID NO: 3366 - protein, 1356 aa, unidentified
  REGION 1..1356: note = Category: MG91 effectors
  REGION 1..1356: note = Description: MG91-558 effector
  source 1..1356: note = uncultivated organism sequence
MGRDYYLGLDMGTSSVGWAVTDEKYNLLRAKGKDLWGIREFEEAEGGIARRQNRISRRRRQREQVRIGLLKSYFAEEIEKGDPDFLQRLENSKYHLSDKDEKVRYKSAIFNDPEYTDKDYYRDYPTIFHLRAELIHNQEPHDIRLVYLALLNMFKHRGHFLNASLSAEEETQSMSDAYTAFRALVEEVMTANETENLFFPDGKADEIEAIISSRDYNRKRKSELMTEMLGFTKKDKAAQALIKGMCGLTVDVKTVFREIESEAKLSISFSDSNYDEKIVEIQEVLDDEQLELLEAVKTIYDIGSLAGVLKGEKYLSDARITDYNKHKEDLALLKKIIRKYTDQKTYNDLFRGTEPGSYSAYVNSTNSGKKQRRNMGGNAKRNQEAFYASLKKLLNKLPSEDDDVQKILADIDKELFLPKQLTFANGVIPNQVHAREMKAILNNAEQYLPFLTEKDESGLTVSERILKLFSFQIPYYVGPVTTKSSRDGGNGWVVRKESGQVLPWNIEDKIDMDATSKKFIENLIRECTYIAGEKVLPKGSLLYERYCVLNEINNIKIDGRPIDVELKQKIFEDKFMSGKKVTRKQLVTYLHGKGVLEDDAQLTGIDKTINNSLSSYGKFLGVFGDELKKDSCQIMVEDIIRDCTIYGDSKKRLRETLQKKYVDNNNLSESQLKRILGFKFKDWGRMSKEFLEMQGINRETGEVMSLVQAMWETNLNLMELIYSEDFTFAEALQEKQAKDYLTLSEFKFEDLDEYYFSAPVKRMVWQTLLIIKELEKVLGAPPKKVFIEMTRSDGVKGDRGRTISRKKQFEDLYKKIKDESQDWASIIDNADASGKLRSKKMYLYLTQMGKCMYTGKPIDLDDLFDDNKYDIDHIYPRHYVKDDNLGNNLVLVEKKANASKGDRYPLDTDIRGKMHGTWKFLKEKGLITEEKYRRLTGSNPFSEEQQADFIARQLVQTSQGTKGVADLLKQLLPDAKIAYSKASNVSDFRRDYDLPKSRLINDFHHANDAYLNIVVGNAYLVKFTQNPLNYIRSGDVQYNLGRMFEKDIVRNGEVAWLADDGKGNHGTIVTVKKVMARNTPMMTRMVLNGHGAIANATLYPASKASADNYIPLKGSDSKIADVTKYGGFTSVSTSRFVLVEHLVKKERIRTLEALPILVANSCKTMEDIENYCEEELGLIAPKVKLDGIKIQSLLKINGFYVHLSGKTNKQLALRNAVNLCLDAKWKEYIHYLEKASNNGNYGNPICSDMNIELYSILAEKHSSSIFAKRPNPVGTKLVKEKETFSKLELVDQVSVLLQILQLSAIGITQADLRAIGGAGIAGKMLISKDISKQEEALLIMQSPTGLYESTIDLKTI

SEQ ID NO: 3367 - protein, 530 aa, unidentified
  REGION 1..530: note = Category: MG91 effectors
  REGION 1..530: note = Description: MG91-559 effector
  source 1..530: note = uncultivated organism sequence
MKNSSIIVSYEITLPQRIYPHLDRLFSVFGRNVRYFIDKLWNDDTLKLINQNGYAVSILKEIIQKPKDLPSRVFRNVLELSGQILRSQIERRRLFDKLIQKPCILIQSDREIAKFLNTSIPFALNVKRQVLKVLKKGEKRDYLSLIKPSFSNTVVITSADDNLKNGQFKKLKIDKNKLTLELKVPVGNNWEWIKVEKFLTNRLKKALKNAKEVKAPLIKKVDLKSGFSVYRLVIPIEIQTKVKDKVERIFALDLSSSEKRLGVGVIVDKEGHSKPVFFNAFKMVRKLERLYKEISSLERKIDHIADGLHSTVKKKHRERLYIRLRHLYQEQKLRWRKFKELRKQILETFTNLIIAHTKAYSCDAITIEDLKFQDLPEWKNRRFRRLFSTWFYSRFENRLRHKAQREGIKILTVNPFNTSQVCHRCGSKCKADRLEFKCESCGKHFDRDYNASVNIGMKALNLACKTKSKSYMDKDTPARFPSLQVLTRYKFKSLLTFLPLLKLIAYLRLVETSYLKLKNLFKYVNSDKYG

SEQ ID NO: 3368 - protein, 525 aa, unidentified
  REGION 1..525: note = Category: MG91 effectors
  REGION 1..525: note = Description: MG91-560 effector
  source 1..525: note = uncultivated organism sequence
MNEVFVLELPLQVEKYQADILNKRYEQLRQLYNYVQGKLLRQYRYFEQMKEYQACKTFKEKKDFFRSHPFHINGVFGSNKKLFNITFDEYGINGFVEKLGKKQVSTGVTYADLGITSTLLDRLSLAIWAAWDKMLYNYHAQRVSFKKRGELNIFGSRKKTNGSGKKMFSGMELHLDKMEVAIKLNGKVGKAAKFMTLPILPNPKHTDYEMWALKGGFDSVTVITIVRRLVRSQYKYYVQLTIEGEKPQKGRTLGKGRVGIDLGPTTVAISGENIVSIDKLAAKCDNIQEEITRLSRKIDRSRRANNPQNFNEDGTIKRGIKLVWNDSKRYKELRRELAELLRKQAAIRKQQHIDRANALLKEGDTFIVENNQISGWTTRAKETKVNEKTGKIQKKKRFGKSVANHAPSMFVSILENKVKSLGGEVVKVDTKNAASQYDFTDGSFTKHELKERNVTLSNGNTHQRDMLAAFNLQHLKYNEPEAKQYDTEAMAADYERFCQLEQEEIQRYKNKEKKDDRGTIGAEKL

SEQ ID NO: 3369 - protein, 632 aa, unidentified
  REGION 1..632: note = Category: MG91 effectors
  REGION 1..632: note = Description: MG91-561 effector
  source 1..632: note = uncultivated organism sequence
MTSQSFVIELPIAVDDAEMRTIVRKLEFARQLHNATLGTAIGQLQQMRQDTAWKQACAMPKGKERTAAFRALDRKYGLTEYDLHSVIARHREGSGRKAELGINETQKIATRVFQAINRYKLGLGGMPRFKSSKRGLHSIEGKTNKTGLKFRQEKKVLNWCGHDYRVLIDPKDNYVQRALKENERSDQYRKIKYCRLVRKRIRSADRFFLQVVIEGTAPVKHVYAPVTERAAIDPGPQSITLFSKAFAGKIQVAGSNNFNEAVSRRLLRAMDRSLRRNNPDAYNEDGTINKGAKLAKSKNYQRKVDQLHEMHRVAAAQRKCRHGQTINLLLSIAGDIRIEKNSWKAFQRGHFGKSLGKSAMSGFIAQLKSKAASAGLKVTEVNPYKLKLSQYDPYTDTYRKKDLSERWQEMKAGSGQYIQRDVLSALLLYCADIEKEIHIPKVAVEQLEGAKQFLTDAGYVVLKSTSSRDQRDPRLASEPKAMTPEMARQKILRGAGDSHLPTDQELGQIRAGGKVSTWSKETFPLQRGVVQKFDDRSEGLDMQTVYLSAGYTMGPHYFAGSIGWLNAELNGSAEGYPQDDGAAFLGALVYYYSLSKRTQLYAFTSFVDGKQLLDAGTDFNQTTGGFGLMHKF

SEQ ID NO: 3370 - protein, 413 aa, unidentified
  REGION 1..413: note = Category: MG91 effectors
  REGION 1..413: note = Description: MG91-562 effector
  source 1..413: note = uncultivated organism sequence
MKENGFSQYGLDAFFKADTKGALYQCGLNSMFLQYLSQCAWSAWDKKLFGKGDFVKTDKVVNIFCSRNKKERFCGFDYDLSTFTISIQSTCTKKIICTIPFVVNKKSDYELFALSQRICRIGIVRKLIRGKYKYYVQFTFDGVPYHKGRNIGTGIVGIDPGPSKIAIVGDNKVEIAKLAPNIEEDERKTARLKRKLDRSRRATNPHMYKEDGTIIKGQRQTCFSKVYNETRKQLADAQRKLAAKRKIAHNELANTLLEYGDTFKVEANSYKSMQARAKATSMTKSGRIRSKKRYGKSINNRAPSEFLVILKNKLLYYPKGKYYDVPSSYACTQFDFTNESFTEHKISERRIVTSDGIQHNRDTLAAFNIKNAIVNDTSTKKKKVTKSKEFFDIVRMKASYNEFCLMERYLLSV

SEQ ID NO: 3371 - protein, 534 aa, unidentified
  REGION 1..534: note = Category: MG91 effectors
  REGION 1..534: note = Description: MG91-563 effector
  source 1..534: note = uncultivated organism sequence
MRTNSLILSYELTLPQRIYPKLDRLFSVFKWKVRDLISDLWNEKGFKLLKEKGSAWGILKNVIERPLNLPSRVHRNILELSGQIIRSHLERKRIFDYIIEKPYRVLCDEKDIAKDLNTSSLFVLNVQNQIKNLLQKEKEKKDYFSVIEPSFSGNVIITSADDNLEKGQFRRLKIQRNKITFEIKVPTFEGWEWIRVVKFIPDKLRKVLSRAKDIKAPLIKRVFLKSGFTIYRLVIPVEIEVKVEERIERVFAIDLSPSEKRLGVGVVVSESGYSKPVFFSAYKKIKKLERLYREISNLERKIDNIGDQIHGTLKREHRERLYQRLEHLFEEQKLRWRKFKELREQILEIFVNFVIEHAKGYCCDAIVIEKLEFKGLPAWNNKRFRRLFSLWFYSEFSKRLEHKALRNGLRVIKVDFHRNSKICHICGSEGRVNKLEFYCPKCQRRFDRDYNGAVNIGMKALMVCRTKPKPYMGKGIPVRVPFPQVPTHSILPFKFKALLFTISFLRLLSYLRVVETSYLKFGRLTGLVGSDKYG

SEQ ID NO: 3372 - protein, 534 aa, unidentified
  REGION 1..534: note = Category: MG91 effectors
  REGION 1..534: note = Description: MG91-564 effector
  source 1..534: note = uncultivated organism sequence
METNSLILSYELTLPQRIYPKLDRLFSVFKWKIRDLISELWNEEGFKLLKEKKSACSILKSIIERPPGIPSRVYRNILELSGQIIRSHLERKRIFDYIIEKPCRVLCDEKDIAKDLNTSSLFVLNVQNQIKNLLQKEKEKKDYFSVIEPSFSGNVIITSADDNLEKGQFRRLKIEGNKITFEIKVPASEGWEWIKVKKFIPDKLRKVLSRAKDIKAPLIKRVFLKSGFTIYRLVVPVEIEVKVEKRIERVFAIDLSPSEKRLGVGVVVFESGYSKPVFFSAYKKVRKLERIYKEISNLERKIDNIANQIHSTFKKKHKAQLYQRLKHLYQEQKLRWRKFKELREQILEIFVNFVIEHARGYGCDAIVVEKLEFKNLPTWNNKRFRRLFSLWFYSRFSKRLEHKALRNGLRVIKVDSCGNSKICHICGFEGRINKLEFYCPKCQKRFDRDYNGAVNIGIKALRVCRTKPKPYKGKGIPVRVPFPQVPTHSILPFKFKALLFTISFLKLLSYLRVVETSYLKFGRLTGLVGSDKYG

SEQ ID NO: 3373 - protein, 1371 aa, unidentified
  REGION 1..1371: note = Category: MG91 effectors
  REGION 1..1371: note = Description: MG91-565 effector
  source 1..1371: note = uncultivated organism sequence
MSQLENNVTKSGYYLGLDMGTDSVGWAVTDDKYNILRAKGKDLWGMREFEEAQTAADRRSHRTSRRRYQREVVRIGLLKDYFHDAIAKVDPLFYQRLENSAYFLEDKDECVRNKNGIFNDKNYTDRDYYRKYPTIFHLRMELINNPEPHDVRLIYLALLQMFKHRGHFLNASLGNEGNEKEFSDLLREMGNTLADITGTSLADNVVAKDVELVLSKRELSRTGKSERLAELFSITKKDKVQFECIKGICGLSIDARKIFEPLENEDKKIEICFSSSGYDEKITDIQGAVGDENYALIEIMKSVYDAGMLAGIMKGKHYLSEARIEDFEKHKKDLSVLKKVIKKYKTDEYDSLFRSEANGSYSAYVDSFNSGVKQRRDMKERKKEDFYKTVKTLIKDMPSDDKDIKYINNEIECDNFMPKQMTSSNGVIPNQVHLFEMKKILGNAESFISFLKEKDESGYSVAERIIKLFAFQIPYYVGPVSEDSGRNGGNGWVVRKEKGKVLPWNIDEKIDMRKTSEQFISRLVRKCTYISGENVLPKESLEYQKYALLNEINVISVDGERISTELKQKMYKELFMSGKSVTRKKIVSYLHNEGILSDETQLSGIDEKVNSNLSSYSKFKSVFGDKIDQDRYQEIAEQIIFWCTVYGDDKKYLSEQLEEKYKDELTDDQIKRITGFKFKDWGKMSKAFLELPGCDKEDGEVVPLVRMMWNTNHNMMELINSEEYTYKDELFAKQRRAINCISELKLEDLDEMYFSAPVKRMVWQTLQIITELEKVMGTAPTKVFVEMTRKHDDNKKRTQTRKDKFLDLYRSVKNDEHNWSQIINTADSDGTIRSKKMYLYLTQKGRCMYTGRPIDLDRLFDDNLYDIDHIYPRHYVKDDNIDNNMVLVEKEKNAHKSDIYPVESSIFSNCVNMWKELYNGKFISEEKFKRLTGREPFNDEQKAGFIARQLVETSQGTKGVSDIIKEALPDETRIIYSKASNVSEFRQEFTIPKSRLINDFHHAHDAYLNIVVGNVYETKFTQNPMNFIKTDYRKDQERNKYNLSRMFDWNVSRGLYTAWTASINSKKNRIDHNIENESGTICTVRKMLKKTTPILTRLSYVGQGGLANATVYSAKKASAGKGYLPLKTEGRLSDVSKYGGVTNASVEYFFLVEYEEKGKKICSLETVPVYMAGKVGKDKVKLEEYCRDILHLSNPSVRVPQIKLASLVKVDGYLLHITGKTGNQICLRNAVNLCEDVETVRYLKKLENSENKGYLEEEITEDENIKLYQNFMDKHINSIFRLRPNPVGDKLLEGFDRFKSLSVEEQTKVLLQMLNLTGIVAGCAADLTAIGESKATGKMLIPQKIIKFKEIKLINQSVTGLYDKSIDLLTV

SEQ ID NO: 3374 - protein, 510 aa, unidentified
  REGION 1..510: note = Category: MG91 effectors
  REGION 1..510: note = Description: MG91-566 effector
  source 1..510: note = uncultivated organism sequence
MRKKTTDENFIMELPLTVEKFQSDELDKRFELMRRIYNSAQNKLKRQYEYLSSFKAYKECKTKKEKGDFLKSHSFSFKGVLDKGGEPLKITFSEYDLKSYLSKFAKIKVDSQYTYSDYGINTSMLMHMAMAIWSAWKKVLYDPKAQEVSFKKHGELQSIGVDWEPKHPAGLILDLQKGELKVNLNNRQGHYARYITMKIKFGRKERQAWYEGDALNAGEDSIRGLTIVRRKIRGKYNYFLQMTIRNNKPQKGRTLGTGRVAIDLGTCKVAVVTKDSVRLIPLAPNISSYSEELRIIQRQMDRSRRANNPQKYHEDGTIKKGNHDKWVSSKEYIRLRDIKAELERKQAAVRKQDHIALANYLLSLGNEFVIENNDVQEWAKRKKEEKRREKDGKILSKAGLGKQIGNHSPAMFVTILKNKVESLGGSFIKVDTDNGATDYDFTNDEFTHHELEERYITLSDGKRHQRDTLAAFNLYHIDTTQNRVYDRLAMQRHYAWFCEREAEAVERFKR

SEQ ID NO: 3375 - protein, 530 aa, unidentified
  REGION 1..530: note = Category: MG91 effectors
  REGION 1..530: note = Description: MG91-567 effector
  source 1..530: note = uncultivated organism sequence
MTSQSFVIELPIAVDDAEMRTIVRKLEFARQLHNATLGTAMGQLQQMRQDAAWKEACVMPKGKERAAAFRALDRKYGLTEYDLHSVIARHREGSGRKAELGINETQKIATRVFQAINRFKLGLGGMPRFKSSKRGLHSIEGKTNKTGLKFRPEKKVLNWCGHDYRVLIDPKDDYIQRALKENERSDQYRKIKYCRLVRKRIRSSDRFFLQVVLEGTAPVKHVYAPVTERAAIDPGPQSIALFSKAFAGKIQVAGSNNFNEAASRRLLRAMDRSLRRNNPDAYNENGTIKKGAKLVKSKNYQRKVDRLREMHRVAAAERKCRHGQTINLLLSIAGDIRIEKNSWKAFQKGHFGKSLGKSAMSGFIAQLKSKAASAGLKVTEVNPYKLKLSQYDPYTDTYRKKDLSERWQEMKAGSGQYIQRDVLSALLLYCANIEKEIHIPKVAVEQLEGAKQFLTDAGYVVLKSTSSRDQRDPRLASEPKAMTPEMARQKILRGAGDSHLPTDQELGRIRAGGKVSTWSKETFPLQRGVV

SEQ ID NO: 3376 - protein, 618 aa, unidentified
  REGION 1..618: note = Category: MG91 effectors
  REGION 1..618: note = Description: MG91-568 effector
  source 1..618: note = uncultivated organism sequence
MAKENFVLTLPLKVEKWQADILDKRYELLRQIYNMVQQKLLRQYIYFSQQKAYRVCESFQQKREFFASHPFHIKGINTKNGEPFDIKFPYTYESRSSGTGKRPSNGISDYVSKLWSHSVGQNTTLSNLGINSYILEELGLHIMGAWEKRLYDPKSSHVSFKKYGDVNSFGSRYKKDKKSNRITLPGFTINIKEGYITYNANGRQGQFADLIRLSIDFSREKKGYATEALKGGLDSVRKLIIVRRCIRGKNKYYLQLTIEGDKPQKGRVLGKGNVGIDIGPSTIATSSLLGVHFDKLADKCDNIEHELYLVGRKMDRSRRANNPQNYNEDGTIKRGVRLVWKKDKDCKRYANLKQVRKELYRKQAEIRKHQHLEMANALLSQGDTFIVENNPIDAWVRRAKETTKTKTGKNRCKKRYGKSVANHAPAMLVSILKNKVQSLGGQFYEVDVRYAATQFDFTNGVKTKHDVSERSITLSNGRTLQRDMLSAFNLQHINQESIGTNDYAYNIEQMQADYPIFCRLESAERNRFKVARHNERDAQYFVGESKKILRLQPQKDTAANRHNGGVDRKHCNTCLGSKTKENAEITGSGLVRESIERVSQVPDEYHPVDTNSIILDGL

SEQ ID NO: 3377 - protein, 555 aa, unidentified
  REGION 1..555: note = Category: MG91 effectors
  REGION 1..555: note = Description: MG91-569 effector
  source 1..555: note = uncultivated organism sequence
MAGGIRATTRLMLYHRNMTTQTFILELPIKADDSQSRTISKKFEYGRMLYNATLGSGLGRLTQMRQDPEWRCACEMSKGKERNELFRRLNRQYRLTEYDFHSDIARHREGTKRKSELGICEAQKLATQAFNAVSRYMFKQGGRPRFKSFKRGLHSLEGKTNTTGLKFKPEKMLLDWCRKTYQVMLDPEDTYALEALYADKERTKFKRIKYNRIVCRNIKGVKRFYLQVVLEGTPPVKHAYAPASERMAIDPGPKAFAVFCPRVQAKVQIAPQAKVNEKAIRRIQRSMDRSLRAKNPNAFDEKGRIKPGVSLAYSKGYQARLTKLREAHRKVAGTRKCEHGELANLLLECAGNIRIEKNSWEAFKRSHFGRSINNSAASGFIQKLKSKAERAGLTVEEVSPYRLKPSQYDPYKDEFVKKALGERWMYLGDESTVIQRDIMSAILIYFADLKNQTHNPEVVKTNLEGLKRGLTDAGYVKHLKLPRSSGSKDPLFAPEPKALTTEELRSKCFRVDSDRHSSTINGTDGKAVGWSETFPLTGELFRDSVLSSVSARGAS

SEQ ID NO: 3378 - protein, 530 aa, unidentified
  REGION 1..530: note = Category: MG91 effectors
  REGION 1..530: note = Description: MG91-570 effector
  source 1..530: note = uncultivated organism sequence
MTFQSFVIELPIAVDDAEMRTIVRKLEFARQLHNATLGTAMGQLQQMRQDTAWKQACAMPKGKERTAAFRALDRKYGLTEYDLHSVIARHREGSGRKAELGINETQKIATRVFQAINRYKLGLGGMPRFKSSKRGLHSIEGKTNKTGLKFRPEKKVLNWCGHDYRVLIDPKDDYIQRALKENERSDKYRKIKYCRLVRKRIRSSDRFFLQVVLEGTAPVKHVYAPVTERAAIDPGPQSIALFSKEFAGKIQVAGSNNFNEAVSRRLLRAMDRSLRRNNPDAYNEDGTIKKGAKLVKSKNYQRKVDRLREMHRVAAAERKCRHGQTINLLLSIAGDIRIEKNSWKAFQRGHFGKSLGKSAMSGFIAQLKSKAASAGLKVTEVNPYKLKLSQYDPYTDTYRKKDLSERWQEMKAGSGQYIQRDLLSALLLYCANIEKEIHIPKVAVEQLEGAKQFLTDAGYVVLKSTSSRDQRDPRLASEPKAMTPEMARQKILRGAGDSHLPTDQELGRIRAGGKVSTWSKETFPLQRGVV

SEQ ID NO: 3379 - protein, 1365 aa, unidentified
  REGION 1..1365: note = Category: MG91 effectors
  REGION 1..1365: note = Description: MG91-571 effector
  source 1..1365: note = uncultivated organism sequence
MKKDSMEYYLGLDMGTNSVGWAVTDTNYKLLRLKGKDAWGIREFDEAKTSEDRRVNRISRRRREREKVRIGLVKDYFSDAIHAVDPNFFMRLENSKYYLEDKDEDVKTPNAIFDDPDYTDKDYYDAYPTIFHLRKELIEDKKPHDVRLVYLAVLNMFKHRGHFLNSGLSTDSDNNIKIDGAWEDLNKTYEELYGEELAVVNCDELLSVLSDRDKSRSAKLEQLLEILQINKKTDKQKAELIRLICGLKSEAKKVFSDIETEEKVEICFTDIAYEEKLPDIAEAVGEENIALIQAAKTVSDIGVLAGILHGDDYLSFARVKTYEKHAEDLKRLKRVIRKYGDEAQYDSLFRSEEDGSYGAYVNSFNAGKKQRRSFKKRTMDEFYKTVKTVLSKLKGASDDPDYQIIEKDIENETFMPKQLTSANGIIPNQVHCRELKVILKNAEGYLPFLLEKDEGGRTVTDRICALFSFQIPYYIGPVSEQSEKNGGNGWVVRKEQGQVLPWNLEEKIDTAATSQRFIERMVRRCTYISDEMVLPKASLEYERFMVLNEINNLRIDGEKIPVSLKQEIYHELYEKGKRVTRKQLVSYLTNRGCIENEEQVSGIDITLHQYLSSYGKFYPIFGDDMKTDACKSMVEEIIRLATIFGDAKHLLRKQITEKYGDRISDPKILKRILGFKFKDWGNLSKRFLELEGCENGVGEIVPLIDMMWQTEFNMMELLNSPRFTYRQTLEEYQQKGLKPLTEWKAEDLNDYYFSAPVKRMVWQTLKIIKEIEMITGSAPKRVFVEMTRKPGEKDKRTDSRKKKFLELYKNIVDEDADWRKHWEGVISKADEDGSIRSKKMYLYLTQMGRCMYTGREIDLNDLFDDNLYDIDHIYARHYVKDDNIANNLVLVYKPENARKTDNYPIDSDIRSKMSGYWSLLHRRKLITDEKYRRLTGRNPFTDEQKADFIARQLVETSQATKGVTEIIKGVFPPEQTTIVYAKASNVSDFRHKYQIHKSRLVNDFHHAHDAYLNIVVGNVYYVKFTQNPLNFIKKEYAMDQEKHRYNLEKMFVWDVKRGDEIAWIGNGKDDKNTQGSLVTVKKMLAKQTPILSRMPITGHGGIANATLYSAKTAKDTGYMPLKTSDPKMQDVTKYGGYSTISRAYFFLVESGTEKKRIRTLETVPVYLVEKLQTKEVLEEYCRNQLKLINPSVRVSKIRLQSLINLNGYYVQMTGVTGKQVILRNAVSLVLNDDEMFYAKKIEKADNGSFEENVITKEKNVAFYDALARKHMETIYSLRPNPVGQKLEKARDLFVELSIEKQCAVLYQILNLSIIGPVKADLTLIGESKNTGVMLTSKNITKNKTFELINQSVTGLFEERVDLLTV

SEQ ID NO: 3380 - protein, 1352 aa, unidentified
  REGION 1..1352: note = Category: MG91 effectors
  REGION 1..1352: note = Description: MG91-572 effector
  source 1..1352: note = uncultivated organism sequence
MLEKPYYLGLDMGTNSVGWAVTDQHYNLLKAKGKDLWGIREFIEADTSVERRTHRISRRRRQRERARIGLLNDYFHDAIIAIDPSFFQRLENSKYHLEDKDQNVRYKYNIFNGPDYTDVDYYAQYPTIYHLRKELLENPKPHDVRLVYLALLNMFKHRGHFLNAGISDGNNEHSLKDAYINFAISVSELTEDYFNQDVDYSAIEGILSSRDLNRTKKAEELSTVLGIDFKDKKYKEYLRAICGLKINAYTLFSDQLPNDTTKIDLCVSDASFDEKSEELVSLIGEDLFQIILNIKEIYDIGSLAGILKGYTYLSQARVAAYDKHKHDLKLLKTSIKKYCTKEEYNNFFNSDADGSYASYTGSFNSGNRERRVGSKRTSEDLYKEIKKLLKDASKNDPAINEIFTSIETESFLPKQLTASNGIIPNQVHSKEMAKILANAENYLPFLKDTDENNLSISNRILQLYKFQIPYYIGPVTEKSQRDGGNGWVIRKDNGRVLPWNIEEKIDVKATSEAFISRMVRRCTYMNGKQVLPKASLEYESFRVLNEINNLRIDGERISVALKQDIYTDLFQKGKKVTKKQLCNYLVTRGLIKSSEQVTGIDIAINNSLSTYGKFKAILGEDIKLDHIQHMIEDIVFWCTVYGDSKQFLKEQIEDKYNGKLSPEQIKRILGFKFKDWGNLSKEFFELKGADKSTGQAISIIRALWENNLNLMELINSPEFDFKERLADYEVNSLKTLSDFEPEDLNEYYFSAPVRRMIWQTTLIIKELVHVLGKEPDRIFIEMTREKDASRGRTLSRKKKFEDLYKNVKDENNDWAKVIEHADESGTIRSKKMYLYLTQKGRCMYTGNHIELSDLFNDNLYDIDHIYPRHFVKDDNIDNNLVLVTKEKNAHKSDNYPLEAEIFNKQRNMWTQLRKEGFISEEKYNRLMGRNAFTDEQKAGFIARQLVETSQGTKGVAELFHQLLPNSKIVYAKAGNVSDFRRNRELPKSRLVNDFHHAHDAYLNIVVGNVYYMKFTQNPINYIKNSYNKDMNKNNYNLSRMFDWDVKRGDEVAWIAQKKDSATGTISTVKKMLSKNTPLMTRLSYEGKGALANETLYSAEKAKGEGYIPFKSSDAKIQDVTKYGGFTSVTGAYFFLVEHDEKKKRIRTIESVPLYLADKIEKDSSELERYCDKLGLVNYDVRVRKIKIGSLIKYNGYFCYITGKTGYRLIVRNATNLCLASNWTKYIKKIEKYKETTIIDNVITAEENIKLYNELLNKFTVGIFGRRPNPIGEKMDSARDKFASLSTENQCLALYQILQLSAILGNESDLQLIGSSTHAGKMLISKKIGTDEIYLINQSPTGLFETKIDLQTI

SEQ ID NO: 3381 - protein, 1127 aa, unidentified
  REGION 1..1127: note = Category: MG91 effectors
  REGION 1..1127: note = Description: MG91-573 effector
  source 1..1127: note = uncultivated organism sequence
MNMSKRILSLDLGITSIGYSILNEMDSNKYGLVDYGVSMFDKATDKDKKSKKLLHSASKSSSKLYDLRKERTRNLANLFEKYNLGSASELLNQEKQNRFINKWYLRAEKSFSERLTIEELFSIFYLVAKHRGYKSLDTDDLLEELLIELGFKVEEKKEKDAEKGKVKQALKTVESFRKKYPEKTVARIIYEIEIQKENPTFRNHDNYNYMIRREYINEEIRKIVQAQDEFGLFDAGIDIELFIKELIDTVDDQKDSTNDMSLFGNCEYFPEHKVTHQYSLLSDIFKMYQSVANITFGKTKISKEQIETIVNDFFKKIKLGKNIADIKYQDIRKVLKLNDEVKIFSKEDYHLDKKGKKIHSTITKFHFLSSLGKIGKSFIESIFEKENKFEILKEIFDVLEFEKAPKSMYNQINEIFIKYTLVEDEKLKNETIINLIKHKSGNSLNISAYTMIQFIPYFERGMTTDEIKQELKLERNEDYSTYKKGIKHLHVKTFEKDDNLEINNHPVKYAVSATMRLVKHLHVTYGVFDEIRVESTRELSQNEETKKAIEKANKENQAKFQKIIDNEEYQKIANHYNKNLKRYARKIMLWEEQEKLDMYSGEVISFNDIFSNKVDIDHIIPQSLGGLSVKHNLVLAHRDENHKKSNQLPMHFVVDTVDYVNRVEHLFKEYKINWKKKINLLAETLDDRYKDTFESKELRATSYIEALAAQMLKRYYPFPDKEKQANGQAVAHVQGRATSNIRKLLGVKTKVRDTNIHHAIDAILIGLTNKSWLQKLSNTFRENMGVIDDKARANIKKEIPLIEGIEPKELVELIEDAYNIYGEDSVFYKDIFGDTKVVNFWVSKKPMSSKIHKDTIYAKKPNGLFTVREGIIKQFIALKTTVTTDPEQFMKNFEKKILQKMYLFMTNPNDVICKIVISRAEEINLLLQSFVNIDRKNKEDMSEAKEKLDKLMHKELLDNNDNVIRKVKFYQSNLTGFDIRGGLATKEKTFIGFKATLENEKLVYERIDASNFKRIQKENDGSFKVYKNDIVFFVYPDGSFRGGKIVSFLADKGITAFLNSKFPSASELQPKSFCKMDKGKKSGAKQQSINKSIGIIKLNLDILGNIKSYSNFGEVSKEVELKIFHKE

SEQ ID NO: 3382 - protein, 533 aa, unidentified
  REGION 1..533: note = Category: MG91 effectors
  REGION 1..533: note = Description: MG91-574 effector
  source 1..533: note = uncultivated organism sequence
MSHSYILSFELTLPQRIYPYLDRLFNVFKWEVRRTVRKIWNEDFFEKLKGKGSASSILTKVLERPSNIPSRVYRNILELSGEIIRSHIERKRIYDYLIDKPCRVLFDEDEIADKLDTSSLFVLNVKRQVRKILKKEKEKKSYFETVKPYFKGKVIIFSADDSVENGQFKKLRFTEKYLELEIKVPDGNLWKWIKVKKFIPDRLKKFLPKAKRTCAPIIKKVYLKSGFYIYRLVIPFEFEVKFSEKNFRVFAIDLSPSEKRLGVGAIVTPEAHSRPLFFSAEKMIRKLERILKEISNLERKIDNIANEIHVTGNKEHKRRLEKRLKHLFVEQKLKWKKFTELRKQILEVFTKLILEHARAYNCSFIVVERLKFSKLPDWKHPRMKRFFSQWFYLRFVERLKQKALRYGIKVFLTNPCRTSRICHRCGKAGLLEKLEFLCECGIYDRDYNASVNIGKKALQILMSGAKSEPYMGEDTPGRFPFPRVPAHQVLPYHFRALLFLITLTRLISYLRIVETSSLKLKNLIRWTGSDRYG

SEQ ID NO: 3383 - protein, 994 aa, unidentified
  REGION 1..994: note = Category: MG91 effectors
  REGION 1..994: note = Description: MG91-575 effector
  source 1..994: note = uncultivated organism sequence
METLRKEYPEKTVARIIYEIEIQKPNPTFRNHDNYNYMIRREYIREEIEKIVLSQMDFGLFAKTFDVDTFIKELISTIDDQKDSTNDLSLFGNCEYYPEEKVAHQYSLLSDIFKMYQSVTNITFGKTKISKEQIKIISDDFFKKIKQSKNIADIKYQDIRKLLKLKDEVQIFGKEDYRLDKKGKKVHYTITKFHFLANLGKIDNSFMDAVFEKKNKYEILKEIFDVLEFEKAPKSMYTQINAVFMKYTLVEDERLKDETIINLIKYKTGSSLNISAHAMIKFIPYFEKGMTLDEIKKELNIKNFEDYSEFKKGIKYLGLGIDKKLFVTVEARDRIKKYPASQFEFDNQLIINNHPVKYVVSATMRLVKHLHVTYGAFDEIRVESTRELSQNEETKKAIDKANRENEAKFQKIIEDEEYQKIAKHYNKNLKRYARKIMLWEEQDKIDIYSGKVICFEDIFTNVVDIDHIIPESLGGLSVKHNLVLAHRDENVKKSNQLPMNFVTDKVAYVNRIEHLYKEYKINWKKKINLLAETLDDSYKDTFESKSLRSTSYIEALTAQMLKRYYPFPDKKKQVNGQAVAHVQGRATSNIRKLLGVKIKVRDTNIHHAIDAILIGLTSKSWLQKLSNTFRENMGVIDDEARAKINKELPLIEGVEPKELVELIEDAYNVYGEDSVFYKDIFGKTKAVNFWVSKKSDTSSLHKETIYGIDKIKGKIKDKQYTGLTTLRIDIIKRLKDAQKKPTLPKIGDDAHMFLNEYQEELIKKLYVYQYNQEDKILAIIQAKASDIAKCLEKYSDIKNENKDLFSKAKEELSCIIDKPLVDYNGNIIRKVKIIVSNKEKEPMIRGGTTVAERIAIGFSVYTLEKDKLLFRRIDLKDKLSKSLTKVNASSSMNIFRNDLIYIIFKKSEKNLVGYLESFDDKTNKIRLYDARFPKRLELQPKKYKVSSGKSRKEFGVGSAMGFIKINLDILGNIKSHTRFGEVSKEVEAQIFHKE

SEQ ID NO: 3384 - protein, 1358 aa, unidentified
  REGION 1..1358: note = Category: MG91 effectors
  REGION 1..1358: note = Description: MG91-576 effector
  source 1..1358: note = uncultivated organism sequence
MQETGKDYYLGLDMGTNSVGWAVTDENYVLMRAKGKDLWGIREFDEALTAVDRRTHRVARRRRQRETARIGLLKEYFHDAIAEADPNFYQRLDNSKYHEEDKDSAVKGKNGIFNDANYTDKDYFKQYPTIFHLRTELIESTEKHDVRLVYLALLNMFKHRGHFLNAGLSTESENTMDTAYHNFVETAAQTIECNFMETVDIEKIKEILGSRDYSRSKKAELVAQLLHVDSKNKVQMACIKCICGLKVTAAAIFGDKMAADEEKKTDICFSDFGYDEKVPVILETVGEENFELVLAMQEIYDIGSLAGIMKDSLYLSMARVKEYEQHGKDLKILKGVVKKYATKEEYDTLFRTMEEGTYSAYVNSVNTKKKSRRDVKKRTRDEFYGRLKKIISTMPQDDSDVLYIKDKMEKEAFLPKQLTASNGVIPNQIHAREMKKILQNAETYLPFLKEKDTSGLTVSERILKLFSFQIPYYVGPVSEKSKLNGGNGWVVRKEEGTVLPWNIEEKIDMTATSREFVERMVRRCSYLSDERVLPKGSLLYERFCVLNEINAIKVDGVKIPVEIKQDLYSKYFKKGKKVTRKKIAEFLIARGVIKEDQTELISGIDIAVNSTLSTYAKFYAIFGEKMEQDSYKKMVEQIVEWCTIYGDAKKFLEQKIKECYGNILTQEEIKRITGFKFRDWGRLSKEFLELSGCSKATGEVMPLISMMWETNDNLMELLDDNYYTYREALEEKQNNAFRLLADIEPEDLDEMYFSAPVKRMVWQTLCIIKELEKVLGKAPKRLFVEMTRNEQKDKKRTDSRKQQFLDLYKNIKDESRDWKELITRADENGTLKSKKMYLYLTQRGRCMYTGHPIDLEDLFKDNRYDIDHIYPRHFVKDDNIMNNLVLVEKEKNAHKSDNYPLEEEIYKKQLPVWKDLHQCKLITDEKFKRLTGRNEFTDEQKAGFIARQLVETSQGTKGVTTILERALPDTKIVYAKASNVSEFRQKRDLLKSRVVNDFHHAQDAYLNIVVGNVYFVKFTQNPLHFIKAEYDKNKAQYEYNLSRMFDRDVRRGNETAWIGCKKGEEAGTIVTVKKMMAKNTPMLTRLSFEGKGGLADQTLYSAEKAKGNGYIPLKTSDAKMQDVTKYGGFNSVSTAYFFLVEHELKGKKVRTLETVPIIWRDRIEKDETMLLKYCTDVLELKNPSIRVKKIKLQSYIKKDGYYMYITGKTNKQITTKNAVELCVNQRWIDYIKIIEKTVEKKKECEEVNYNKNVEFYDLLLTKHTQEIFSNRPNPVGAKLKQGRDKFLSLTLFEQSTVLYEILQLSIIGNTRADLHSIGGAPISGVMLLSKKITDSKEFILINQSVTGLFEQKVDLLTV

SEQ ID NO: 3385 - protein, 497 aa, unidentified
  REGION 1..497: note = Category: MG91 effectors
  REGION 1..497: note = Description: MG91-577 effector
  source 1..497: note = uncultivated organism sequence
MTSPTFIIELPIRVSDSESRTILRKLEFARQLHNATLGTALGQLQQLRQDSEWEKACLMPKGKERSELFRKLDRKYQLTEYDLHTVIAKHRQRSGRKTELGINETQKIATRVFQAVNRYKLGLGGRPRFKSLSRGLRSIEGKSNKTGLKFNIEKSVLSWCKHDYRVFIDPQDDFLQRALRSEGRSGFKKVKYCRLVRKTIKGKNRFYLQVVLEGQAPIKHIYASTSERLSIDPGPQTIAVFSDVWAGKIKVSPTAQVDEKRLRCIQRSMDRSLRKSNPDCYESDGTLRKGCVLKKTKGYEKRIQRLQECHRRAAATRRCEHGQLINLLLSMAGDIRVEKNQWKAFQRGHFGKSLGKSGISGFIERLKSKAESAGLKVTEVKPYKLKLSQYDPYTDQYRKKSLNERWHSLGESSEWIQRDVMSALLLQCADLEEEKHIPTEVIKTLEGVKQLLRDAGYVILKPSSNGESNPTFASEPKAVTPEKVRLEIFCGASDSYL

SEQ ID NO: 3386 - protein, 497 aa, unidentified
  REGION 1..497: note = Category: MG91 effectors
  REGION 1..497: note = Description: MG91-578 effector
  source 1..497: note = uncultivated organism sequence
MTSPTFIIELPIRVSDSESRTILRKLEFARQLHNATLGTALGQLQQLRQDSEWEKACLMPKGKERSELFRKLDREYQLTEYDLHTVIAKHRQRSGRKTELGINETQKIATRVFQAVNRYKLGLGGRPRFKSLSRGLRSIEGKSNKTGLKFNIEKSVLSWCKHDYRVFIDPQDDFLQRALRSEGRSGFKKVKYCRLVRKTIKGKNRFYLQVVLEGQAPIKHIYASTSERLSIDPGPQTIAVFSDVWAGKIKVSPTAQVDEKRLRCIQRSMDRSLRKSNPDCYESDGTLRKGCVLKKTKGYEKRIQRLQECHRKAAATRQCEHGQLINLLLSMAGDIRVEKNQWKAFQRGHFGKSLGKSGISGFIERLKSKAESAGLKVTEVKPYKLKLSQYDPYTDQYRKKSLNERWHSLGESSEWIQRDVMSALLLQCADLEEEKHIPTEVIKTLEGVKQLLRDAGYVILKPSSNGESNPTFASEPKAVTPEKVRLEIFCGASDSYL

SEQ ID NO: 3387 - protein, 529 aa, unidentified
  REGION 1..529: note = Category: MG91 effectors
  REGION 1..529: note = Description: MG91-579 effector
  source 1..529: note = uncultivated organism sequence
MNTPSFVIELPIRTDDHERRTIVGKLEYARCLHNATLGTALGQLQQMRQDPAWKKACRMPKGKERTNAFRALDRQYGLTEYDLHAAIARHRQGSGRKEELGINETQKIATRIFQAVSRYKLGLGGRPRFKSQSRGLHSIEGKTNKTGLKFKPETSTLDWCGHEYRVLIDQRDGYLQRALREEADPKRWRKVKYCRLVRRRIRGKERFYLQVVLEGTAPLKRVYAPVVERLAIDPCPQTVAVFCPRFAGKIEVAPHAKVDEAELRVLQRSMDRSLRSCNPKAYNEDGTIKPGVELVKSKGYLKRVARLQELYRKAAATRKCDHGQLINLLLCLAGEIRIEKNSWAAFQRSHFGKSLGRSGVAGCLSQLKAKAESAGLKVIEAAPYKLKLSQYDPYTDSFRKKQLNERWHRAGMGDEYIQRDVLSAALLYCADLETQSHIPKAALALLEGAKQLLKDAGYWVSKPTSSQDPCDPRFAPEPKALTPEAVRLEIFGGTGDSPLQPSCPNGSKGAEGKVSACSKETFLLQQGVV

SEQ ID NO: 3388 - protein, 484 aa, unidentified
  REGION 1..484: note = Category: MG91 effectors
  REGION 1..484: note = Description: MG91-580 effector
  source 1..484: note = uncultivated organism sequence
MAHKENQKAFVVTFPLHTEKWQEDRIDKMMRMLTTFYNDRQRKLVRRYIYLSHSKAYKEAKGKGVVAFKNYMKENGFSQYGLDAFFKADTKGALYQCGLNSMFLQYLSQCAWSAWDKKLFGKGDFVKTDKVVNIFCSRNMKGRFCGFDYDLSTFTIRIKSTCTKKIICTIPFVVNKNSEYELYALSQKICRIGIVRKLIRSKYKYYVQFTFDGVPYNKGRNIGTGIVGIDPGPSKIAIVSDEKVEIAKLAPGIEEDERKTARLRRKLDRSRRATNPHMYKEDGTIIKGQRQTYFSKVYNETRKQLADAQRKLAAKRKIAHNELANTLLEYGDTFKVEANSYKSMQARTKATSMTKSGRIRSKKRYGKSINNRAPSEFLVILKNKLLYYPKGKYYDVPSSYACTQFDFTNESFTEHKISERRIVTSDGIQHNRDTLAAFNIKNAIVNDTSTKKKKITKSKEFFNIVKMKASYNEFCVKERYLLSV

SEQ ID NO: 3389 - protein, 530 aa, unidentified
  REGION 1..530: note = Category: MG91 effectors
  REGION 1..530: note = Description: MG91-581 effector
  source 1..530: note = uncultivated organism sequence
MTSQSFVIELPIAVDDAEMRTIVRKLEFARQLHNATLGTAMGQLQQMRQDAAWKEACVMPKGKERAAAFRALDRKYGLTEYDLHSVIARHREGSGRKAELGINETQKIATRVFQAINRYKLGLGGMPRFKSSKRGLHSIEGKTNKTGLKFRPEKKVLNWCGHDYRVLIDPKDDYIQRALKENERSDQYRKIKYCRLVRKRIRSSDRFFLQVVLEGTAPVKHVYAPVTERAAIDPGPQSIALFSKAFAGKIQVAGSNNFNEAASRRLLRAMDRSLRRNNPDAYNENGTIKKGAKLVKSKNYQRKVDRLREMHRVAAAERKCRHGQTINLLLSIAGDIRIEKNSWKAFQKGHFGKSLGKSAMSGFIAQLKSKAASAGLKVTEVNPYKLKLSQYDPYTDTYRKKDLSERWQEMKAGSGQYIQRDILSALLLYCADIEKEIHIPKVAVEQLEGAKQFLTDAGYVVLKSTSSRDQRDPRLAPEPKAMTPEMARQKILRGAGDSHLPTDQELGRIRAGGKVSTWSKETFPLQRGVV

SEQ ID NO: 3390 - protein, 530 aa, unidentified
  REGION 1..530: note = Category: MG91 effectors
  REGION 1..530: note = Description: MG91-582 effector
  source 1..530: note = uncultivated organism sequence
MTSQSFVIELPIAVDDAEMRTIVRKLEFARQLHNATLGTAMGQLQQMRQDAAWKEACVMPKGKERAAAFRALDRKYGLTEYDLHSVIARHREGSGRKAELGINETQKIATRVFQAINRFKLGLGGMPRFKSSKRGLHSIEGKTNKTGLKFRPEKKVLNWCGHDYRVLIDPKDDYIQRALKENERSDQYRKIKYCRLVRKRIRSSDRFFLQVVLEGTAPVKHVYAPVTERAAIDPGPQSIALFSKAFAGKIQVAGSNNFNEAASRRLLRAMDRSLRRNNPDAYNENGTIKKGAKLVKSKNYQRKVDRLREMHRVAAAERKCRHGQTINLLLSIAGDIRIEKNSWKAFQKGHFGKSLGKSAMSGFIAQLKSKAASAGLKVTEVNPYKLKLSQYDPYTDTYRKKDLSERWQEMKAGSGQYIQRDILSALLLYCADIEKEIHIPKVAVEQLEGAKQFLTDAGYVVLKSTSSRDQRDPRLAPEPKAMTPEMARQKILRGAGDSHLPTDQELGRIRAGGKVSTWSKETFPLQRGVV

SEQ ID NO: 3391 - protein, 529 aa, unidentified
  REGION 1..529: note = Category: MG91 effectors
  REGION 1..529: note = Description: MG91-583 effector
  source 1..529: note = uncultivated organism sequence
MSTPSFVIELPVRTDNGEQRTIERKLEYARCLHNATLNTALGQLRQMRQDPAWKEVCRMPKGKKRTDAFRALDRQYGLTEYDLHAVIARHREGSGRKAELGINETQKIATRIFQAVSRYKLGLGGCPRFKSFSRGLHSIEGKTNKTGLKFKPEEAVLDWCEHEYRVLIDQEDDYLQRALRDDSDPEKWRKVKYCRLVRRRLRGKVRFYLQVVLEGTAPLKHVCAPVTERLAIDPCPQALAVFCPRFAGKILVAAHAKLDETAIRVLQRSMDRSLRSCNPKAYNEDGTIRQGVELVKSKGYLKRVSRLRELHRKAAATRKCDHGQLINLLLSLGGEIRIEQNSWAAFQRSHFGKSLGKSAVAGCLSQLKAKAESAGLKVIEVAPYKLKLSQYDPYTDSFRKKQLNERWHRAGTGDEYIQRDVLSASLLYCADLETQSHIPKAALALLEGAKQLLKDAGYWVSKPTSSQDPCDPRFAPEPKALTPETVRLEIFGGTGDSPLQPSCPNGSKGVEGKVSACSKETFPLERGVV

SEQ ID NO: 3392 - protein, 500 aa, unidentified
  REGION 1..500: note = Category: MG91 effectors
  REGION 1..500: note = Description: MG91-584 effector
  source 1..500: note = uncultivated organism sequence
MTTPTFVLELPVKLGQGELAEVRKRFNYARNLYNATVGTALGQLQQMRQDPQWRQACSMPKGKERTTTFRRLDEKYRLREYDLHAIIAKHREASGRKHDLGINEAQKLATRVYEVVTKYKLGLGGKPRFKTQSRGLHSISGKTNKTGLRFKPEKSRLYWNSLEMFVEIDRKDRYIFEALHVDKDPSRFKRIKYCSLVRKVINGKERYYLQLSLEGQAPIKHIYAPQTERLAIDPAPKAITVFHKETVFKASIEVSVHAEKQKKLQKQMSRSLQLNNPDAFDENGTLKKGARLQVKSKSYLKKQTQLCEVHRRAAAARKNLHGQVSNLLLSLAGEIVLEKNSWKALQRGHFGKSLGKSGMGAFERTLISKAERAGCKVHLVAPYILKPSQYDPFKDAFEKIPLKQRWRRMDDKELIQRDMLSAVLLYCADLANERHNRTEIFQTLEGAKQLLSDGGFVVKENPTSNPALDPRFAPERKAQAIEEVRREILCGCKGQLNANR

SEQ ID NO: 3393 - protein, 529 aa, unidentified
  REGION 1..529: note = Category: MG91 effectors
  REGION 1..529: note = Description: MG91-585 effector
  source 1..529: note = uncultivated organism sequence
MSTPSFVIELPVRTDNGEQRTIERKLEYARCLHNATLNTALGQLQQMRQDPAWKEVCRMPKGKKRTDAFRALDRQYGLTEYDLHAVIARHREGSGRKAELGINETQKIATRIFQAVSRYKLGLGGRPRFKSQSRGLHSIEGKTNKTGLKFKPETSTLDWCGHEYRVLIDQQDGYLQSALREETDPKRWRKVKYCRLVRKRIRGKERFYLQVVLKGTAPLKRVYAPVVERLAIDPCPQTVAVFCPRFAGKIEVAAHAKVDEAELRVLQRSMDRSLRSCNPKAYNEDGTIKPGVELVKSKGYLKRLARLQELYRKAAATRKCDHGQLINLLLSLGGEIRIEQNSWAAFQRSHFGKSLGKSAVAGCLSQLKAKAESAGLKVIEAAPYKLKLSQYDPYTDSFRKKQLNERWHRAGTGDEYIQRDVLSASLLYCADLETQSHIPKAALALLEGAKQLLKDAGYWVSKPTSSQDPCDPRFAPEPKALTPETVRLEIFGGTGDSPLQPSCPNGSKGVEGKVSACSKETFPLERGVV

SEQ ID NO: 3394 - protein, 530 aa, unidentified
  REGION 1..530: note = Category: MG91 effectors
  REGION 1..530: note = Description: MG91-586 effector
  source 1..530: note = uncultivated organism sequence
MKNSSIIVSYEITLPQKIYPYLDRLFSVFGRNVRYFIDKLWNDDTLKLINQNGYAVSILKEIIQKPKDLPSRVFRNVLELSGQILRSQIERRRLFDKLIQKPCILIQSDREIAKFLNTSIPFALNVKRQVLKVLKKGEKRDYLSLIKPSFSNTVVITSADDNLKNGQFKKLKIDKNKLTLELKVPVGNNWEWIKVEKFLTDRLKKALKNAKEVKAPLIKKVDLKSGFSVYRLVIPIEIQTKVKDKVERIFALDLSSSEKRLGVGVIVDKEGHSKPVFFNAFKMVRKLERLYKEISSLERKIDHIADGLHSTVKKKHRERLYIRLRHLYQEQKLRWRKFKELRKQILETFTNLIIAHTKAYSCDAITIEDLKFQDLPEWKNRRFRRLFSTWFYSRFENRLRHKAQREGIKILTVNPFNTSQVCHRCGSKCKADRLEFKCESCGKHFDRDYNASVNIGMKALNLACKTKSKSYMDKDTPARFPSLQVLTRYKFKSLLTFLPLLKLIAYLRLVETSYLKLKNLFKYVNSDKYG

SEQ ID NO: 3395 - protein, 495 aa, unidentified
  REGION 1..495: note = Category: MG91 effectors
  REGION 1..495: note = Description: MG91-587 effector
  source 1..495: note = uncultivated organism sequence
MAREKEDSGCFVVTFPLKTEKWQEDRIDKILNLLTVRYREKQKTLLDRYIHLSHSPEFKEAKNAGLKAFRDFMNEHKFTKYDVEKVFSDSSQSKSATTDIMLTHGINSVIMQELSHRAWSAWEKKLYGQGKFIRLDNEVNSFKSRLQGSNIIGFEYSFTDMTLSMKATKPKKHTMFTIPFIVNRKSEYEAYALGCEVRNIAIVRQQIRGKNKYYVQFSFAGTPYNKGRKMGTGIVGIDPGPSKIAIVSDSEIRITTLAPSVKRDERAIRRMQRKLDRSRRATNPDNYNDDGTIKRGIKLKFDKSNSYKRTQAKLADMQRKLAAKRKIDHNILANEIITMGNEFHVENNSFKSMQARSKETKKNDKGKNLSKKRFGKSLANRAPYELLTILKNKVCQYADGEYVDIPSRVACTQFDFTNGEFTKHDPEERIITTSDGLVHDRDALAAFNMRFVNRQRIEGKKKLEKDKENFDLQAMTEAYKQFCALEENIKIGKRN

SEQ ID NO: 3396 - protein, 490 aa, unidentified
  REGION 1..490: note = Category: MG91 effectors
  REGION 1..490: note = Description: MG91-588 effector
  source 1..490: note = uncultivated organism sequence
MARENENSGCFVVTFPLKTEKWQEDRIDKILTLLTVRYREKQKILLDRYIHLSHSPEFKEAKKTGLKAFRDFMNEHNFTKYDVEKVFSDSSLSKSVTADIMLTHGINYSIMQELSHRAWSAWEKKLYVQGKFIKLDNEVNIFKSRLKGSTITGFEYSFTEMTLSMNATKPKKHTMFTIPFVVNRKSEYEAYAMDCEVRNIAIMRQQIRGKNKYYVQFSFAGTPYNKGRKIGTGIVGIDPGPSKIAIVSDSEIRITTLAPSVNRDERAICRMQRKLDRSRRATNPDNYNDDGTIKRGIKLTFEKSNSYKRTQTKLADTQRKLAAKRKIDHNILANEIIAMGNEFHVENNSFKSMQARSKETKKNDKGKNMSKKRFGKSLANRAPSELLTILKNKVNQYADGDYVDIPSGVACTQFDFTNGEFTKHELKDRTITTSDGVVHDRDALAAFNMRFVQKKKVEGKKKIEKAKENFDLQAMTEAYKHFCSLEKNIK

SEQ ID NO: 3397 - protein, 524 aa, unidentified
  REGION 1..524: note = Category: MG91 effectors
  REGION 1..524: note = Description: MG91-589 effector
  source 1..524: note = uncultivated organism sequence
MNEVFVLELPLQVEKYQADILNKRYEQLRQLYNYVQSKLLRQYRYFEQMKEYQVCKTIREKREFFRNHPFNINGVFDRSGRLLDITFDEYGIQGFVEKMIHKSVGENTTYADLGLNTLILDYLSASIWRAWDKKLYDLKAKRISFKKYGELDSFSSRRKVVNGTARFFGVELYLDKMELAVKVNGKVGKNAKFITLKMLHNPKHADYEMWALKGGVDSVKVVKVVRRLVRSQYKYYVQLTIEGEKPQKGRTLGKGNVGIDLGPTTVAVSGENVVSIDKLASNCDNIQEEITRLSRKIDRSRRANNPQNFNEDGTIKRGIKLVWNDSKRYKELRRELAELRRKQAAIRKQQHIDRANALLKEGDTFIVENNQISGWTTRAKETKVNEKTGKIQKKKRFGKSVANHAPSMFVSILENKVKSLGGEVVKVDTKNAASQYDFTDGSFTKHELKERNVTLSNGDTHQRDMLAAFNLQHLKLDETKTKQYDTETMAADYKRFCQLEQEEIQRYKNKEKKDDRGTVGAERL

SEQ ID NO: 3398 - protein, 1358 aa, unidentified
  REGION 1..1358: note = Category: MG91 effectors
  REGION 1..1358: note = Description: MG91-590 effector
  source 1..1358: note = uncultivated organism sequence
MEKEYYLGLDMGTNSVGWAVTDDAYNLIRFKGKDMWGIREFDEANPAVERRTHRTSRRREQRNAVRMGLIRSYFADEIQKVDSNFYQRLDNSFFHVEDKQDNVKDKNGIFNDKNYKDADYYKQYPTIFHLRKELIEDASQKDVRLVYLAVANMFKHRGHFLLSGIGSESSKQTITDLYNQVSGLITEEYGISLKTDIAGTDFEQVLCSREYSRTRKSEKVCEILEIKNSDKLKKAFVKSMCGLSVKITDIIDDTFTEISDEDKKITFSFVDSDYDEKAGVLEEKLGTDVYDIISKLKEIHDKAQVAEIMKNYQYLSFARVADYEKHKKDLKILKRVVKKHFEPTVYDKLFRSEENGTYSAYVNSFNSEEKSRRNYKERKQEDLYNSIKKLLKSVDNVDDTDIEYIKNEMDKENFLPKQLTFKNGVIPNQIHASELKAILKNAEKYLPFLNEKDESGYTVSERILKLFSFQIPYYVGPVSSNSNGWGKRLESGQVLPWNIDKKIDLKETSEQFIQRMVRNCTYIAGEKVLPKASLLYENFKVLNEINNLSINDERITVNLKQDLYNTLFLKGKRVTRKQIFNYFHSRGLVEEDSQISGIDIAVNNSLSTYGKFLPLFGEHLKEDKYKKMVDDIVFWCTVYGDSRKFLREQLEEKYSDVLDENQIKRITGMKFKDWGNLSKEFLELSGCCKSTGEMIPLIRAMWETNYNLMELLHSEEFTYSEELEEKQGKIEKVLSEYTIDDLNEEYFSAPVKRMVWQTLLIIKEIEKIMKCPPTRIFVEMTRKDDEKGDNGRKSSRKDQLLALYKKIQSEDKEWKKEMSSRIEDYDKNGALRSKKLYLYFIQKGLDMYTGKPIDLDNLMSANSNYDIDHIYPRHFVKDDNINNNLVLASKPANAEKSDIYPIKDSIYQKMKYTWKVLRDEGLITEEKYKRLTGRNPFTDEQKAGFIARQLVETGQGTKGVADLLTALLPDTKLVYSKAGNVSDFRKRYDIPKSRLINDFHHAHDAYLNIVVGNIYFTKFTSNPLNYIRKECSSKDNKYQYNLGNMYKWDVKRDGKTAWIAAKEGETGTIATVKKILSRNTPTLTRLTIEGHGGIADATLYSHKKAKQDAYIPLKSSDARMADVTKYGGYSSVTTAYLFLVEHEIKGKKIRTLETVPLYLKDRLENSKEKLEEYCRETLGYTNPSVRMKKIKLQSLIKLNGYYMQISGRTGNRFTLRNYVQLCLNGKWVDYIHKLEKYQDKGFIDNVITDEKNVELYNVLCEKHSVGIFTLRPNPVGDKIKKGYDKFVNLTTEEQIKLLIEIIKLTCVGIVSANLTLIGGASISGKMLISKNITDAKECLLINQSVTGLYENRIDLLRV

SEQ ID NO: 3399 - protein, 524 aa, unidentified
  REGION 1..524: note = Category: MG91 effectors
  REGION 1..524: note = Description: MG91-591 effector
  source 1..524: note = uncultivated organism sequence
MNEVFVLELPLQVEKYQADILNKRYEQLRQLYNYVQGKLLRQYRYFEQMVDYQACKSIREKKDFLKNHPFHINGVLDKSGDQLDITFDEYGIQGFVEKLIHKSVGENTSYADLGFNTLILDYLSASIWRAWDKKLYDLKARRISFKKYGELDSFSSRRKVVRGMVYFSGMELHLDTMELAIKMNGKLGNNAKFITLKMLHNPKHAEYEMWALKGGVDSVKVLKVVRRLVRSQYKYYVQLTIEGEKPQKGRTLGKGNVGIDLGPTTVAVSGKNVVSIDKLASKCDNIQEEITRLSRKIDRSRRANNPQNFNEDGTIKRGIKLVWNDSKRYKELRRELAELRRKQAAIRKQQHIDRANALLKEGDTFIVENNQISSWTTRAKETKVNEKTGKIQKKKRFGKSVANHAPSMFVSILENKVKSLGGEVVKVDTKNAASQYDFTDGSFTKHELKERNVTLSNGDTHQRDMLAAFNLQHLKYDEKDTKQYDTEAMTADYERFCQLEQEEIQRYKNKEKKDDKGTIGAEKL

SEQ ID NO: 3400 - protein, 1136 aa, unidentified
  REGION 1..1136: note = Category: MG91 effectors
  REGION 1..1136: note = Description: MG91-592 effector
  source 1..1136: note = uncultivated organism sequence
MSNKILSLDLGITSIGYSILEEMKNDRYSLLDYGISMFDKPTDKDGNSKKLLHSQSVSTTKLYDLRKERKQNLASLFEEFHLSTKALLLNQEKQNVYIQKWELRAKKAFEEKLEVGELFTIFYALAKHRGYKSLDSGDLLEELCVNLGIEREQSNNKKKDDDEKGKIKNALKTIENLRLDFPEKTVAQIIYETELQKENPTFRNHDNYNYMIRREYINDEIKKIIVFQKEFGFFSSNFDVEEFTSSIIATIDDQKDSTNDMSLFGFCEYYKDEEQKVAHQYSLLSDIYKMYESVSNINFNANPTIKITPEQIKLVADDFFTKVKKGKSIADIKYKDIRKILNLDDDFKIFNKDDSYSNKGKQQENRIIKFHFVNNLSKINNQFIVDIFEKENRYELLKEIFDVLAYEKAPHAIYEQLKDKIKDEKTIIDLIKYKSGNSLNISHYAMMKFIPYFEQGLNTDEIKEKLGLDRKEDYSSFKKGIKYLHINRFEEDDNLKINNHPVKYVVSATLRVIKHLHSIHGAFDEIRVESTRELSQNEQTKKDIEKANRVFEKELDAIVDDVEYQKIAEQYGKNLRKYARKILMYKEQEGRDIYSGEGIELKDIFTNIVDLDHIIPQSLGGLSVKHNFVLAHRDTNVQKSNQLPLNFVKEKQAFINRVEYLFEHHKINWKKKKNLLATTLEESFVDTFESKPLRATSYIEALTAQVLKRYYPFPNEKKESDGSAVRHIQGRATSNIRKLLGVKTKVRDTNIHHAIDAILIGFTNHSWLQKLSNTFRENMGVIDDEARSNIKKETPIIELIVNDEVEYLSPKELCEKIEESYNEFGEDSVFYRDVWGKVKVVNFWVSQKPMVSKIHKDTIYSKKRDSIFTVRENIINKFVLLKITSTTSSQKFMENFEKNILKKMYLFKTNPKDVICQIVQNRAKNIATLLDTFMEIDTENKEQISDAKGKLEQLMHKDLLDNNANIIRKIKFYQTNLTGFDVRGGLATKEKTFIGFRAWLEGENLQYERIDIANFDKIKKENDSSFKIYKNDVVFFVYADGSYRGGKIVSFLDYKGIASFSNSNYPALSEYQPKSFCKMGKDKHGNPKKSGAKQQTINASIGIIKLNLDITGNIRSYQVIGNVQSELLDFIKGIIK

SEQ ID NO: 3401 - protein, 507 aa, unidentified
  REGION 1..507: note = Category: MG91 effectors
  REGION 1..507: note = Description: MG91-593 effector
  source 1..507: note = uncultivated organism sequence
MKEQILSYELTLPQRIYPHLDRLFSVFKNQVNSYIPKLWNEKGFKLLSQKGSAVGILKKEFPTPEGIPSRVFRNVLELTGQIIRSQIERKEVFEKLLKGEEIKGYSKNFVLNIQRQIENLRKKGKEISCYFDLPHPKFNGQIVITSADDNLEKGQFRRLKISGNFLEFSIKVPTQKGWDWIKVKKLIPERLRRALTKAKEVKAVLIKKVLLKSGYHIYRLVIPLSFEVKEPENVERVLALDLSPSEKRLGTAVLVEGEKVSKPLFFKTQMLRKVERLHFEVSNLERKIDNIYNSIEKTACKREKERLWERLRHLFVEQKLRQRKIKQLRKEILETFTNLVIAHAKVYDCQAIVVEDLSFKEVPDWKDKKALRRFSQWFYSRFASRLEEKARLYNLKVIKVNPAHTSRICHKCGKEGKTERLVFKCSCGKYDRDYNASVNIAFRLTKPKAQRAEGIPGRFPSRLVQVEWKALLSFISFSKLLAWLRVVETSQLKLKKLLKRVYSDKYG

SEQ ID NO: 3402 - protein, 534 aa, unidentified
  REGION 1..534: note = Category: MG91 effectors
  REGION 1..534: note = Description: MG91-594 effector
  source 1..534: note = uncultivated organism sequence
METNSLILSYELTLPQRIYPKLDRLFSVFKWEVRDLISELWNEEGFKLLKEKNSACSILKSIIERPPGIPSRVYRNILELSGQIIRSHLERKRIFDYIIEKPCRVLCDEKDIAKDLNTSSLFVLNVQNQIKNFLQKEKEKKDYFSVIEPNFSGNVIITSADDNLEKGQFRRLKIEGNKITFEIKVPTFEGWEWIKVKKFIPDRLKKVLSRAKDIKAPLIKRVFLKSGFTIYRLVIPVEIEVKVEERIERVFAIDLSPSEKRLGVGVVVSESGYSKPVFFSAYKKIKKLERLYREISNLERKIDNIGDQIHGTLKREHRERLYQRLEHLFEEQKLRWRKFKELREQILEIFVNFVIEHARGYCCDAIVIEKLEFKGLPAWNNKRFRRLFSLWFYSRFSKRLEHKALRNGLRVIKVDSCGNSKICHICGSEGKVNKLEFYCLRCQRRFDRDYNGAVNIGIKALRVCRTKPKPYKGKGIPGRVPFPQVPTHQVLPFKFKVLLFTISFLKLLSYLRVVETSYLKFGRLTGLVGSDKYG

SEQ ID NO: 3403 - protein, 473 aa, unidentified
  REGION 1..473: note = Category: MG91 effectors
  REGION 1..473: note = Description: MG91-595 effector
  source 1..473: note = uncultivated organism sequence
MRQDPEWRRALGMVKGKERNELFRRLNRQYRLTEFDFHADIARHREGTKRKSELGINEAQKLATQAFNAVSRYMFKQGGRPRFKSFKRGLHSIEGKTNKTGLKFKPDQMILDWCRKTYQVMLDPKDAYALDALYADKERTQFKRIKYNRIVCRNIKGVKRFYLQVVLEGTPPVKHAYAPASERMAIDPGPKAFAVFCPRVQAKVQVAPRAKVNEKAIRRIQRSMDRSLRATNPNAFDEKGRIKPGVSLAYSKGYQVHLTNLREAHRKAAGTRKCEHGELANLLLECAGNIRIEKNSWEAFKRSHFGRSINNSAASGFIQRLKSKAERAGLTVEEISPFRLKPSQYDPYKDEFVKKALGERWMYLGDESTVIQRDIMSAILIYFADLKNQTHNPEVVKASLEGLKRGLTDAGYVKHLKLPRSSGSKDPLFAPEPKALTTEELRSKCFRVASNSHSSTLNGTDGKAVGWSETFWL

SEQ ID NO: 3404 - protein, 530 aa, unidentified
  REGION 1..530: note = Category: MG91 effectors
  REGION 1..530: note = Description: MG91-596 effector
  source 1..530: note = uncultivated organism sequence
MKTGSVIVSYELTLPQRIYPHLDRLFSVFGRSVRDFIDRFWNESTLELLSQKGHVCSIIKEIVQKPQNLPSRVFRNALELSGQILRSQIERKKLFDTFMQYPCLVLYDEKEIAKSLNTSIWFALNVKRQVLKLLRKGERGDYFSLVKPSFSNSVVITSADDSLERGQFKKLRIEKNKLLFELKVPIGNTWKWVKVTKFIPDRLRKALRNAKEIKAPLIKRVTLKSGFTIYRLVIPVEVELRVKNRVERVFALDLSPSEKRLGVGVVVDKEGHSKPVLFTAYKMVRKLERLYGEISGLERKIDNIADDLHSTFKKGHKERLNQRLRHLYQEQKLRWRKFKELRKQILETFINLVIAHAKAYSCDAIAIEDLKFKDLPDWENKRFRRLFSTWFYSRLEERLRHKAQREGIKVLSVNPFNTSQVCHECGSKGKANRFEFVCESCGKRFDRDYNASVNIGIKALTLACKTKSKPYMGEDIPARVSSLQVLTRYKFKALLTLLSFLKLLAYLRLVETSYLKLKSLLKCISADKYG

SEQ ID NO: 3405 - protein, 529 aa, unidentified
  REGION 1..529: note = Category: MG91 effectors
  REGION 1..529: note = Description: MG91-597 effector
  source 1..529: note = uncultivated organism sequence
MNTPSFVIELPIRTDDHERRTIVGKLEYARCLHNATLGTALGQLQQMRQDPAWKKACRMPKGKERTNAFRALDRQYGLTEYDLHAVIARHRQGSGRKEELGINETQKIATRIFQAVSRYKLGLGGRPRFKSQSRGLHSIEGKTNKTGLKFKPETSTLDWCGHEYRVLIDQRDGYLQRALREEADPKRWRKVKYCRLVRKRIRGKERFYLQVVLEGTAPLKRVYAPVVERLAIDPCPQTVAVFCPRFAGKIEVAPHAKVDEAELRVLQRSMDRSLRSCNPKAYNEDGTIKPGVELVKSKGYLKRVARLQELYRKAAAARKCDHGQLINLLLCLAGEIRIEKNSWAAFQRSHFGKSLGRSGVADCLSQLKAKAESAGLKVIEAAPYKLKLSQYDPYTDSFQKKQLNERWHRAGTGDEYIQRDVLSAALLYCADLETQSHIPKAALALLEGAKQLLKDAGYWVSKPTSSQDPCDPRFAPEPKALTPETVRLEIFGGTGDSHLQPSCPNGSKGAEGKVSACSKETFALERGVV

SEQ ID NO: 3406 - protein, 1359 aa, unidentified
  REGION 1..1359: note = Category: MG91 effectors
  REGION 1..1359: note = Description: MG91-598 effector
  source 1..1359: note = uncultivated organism sequence
MQEKPYYLGLDMGTNSVGWAVTDQHYNLLKAKGKDLWGIREFIEADTSVERRTHRISRRRRQREQARIGLLNDYFHDAIIAIDPSFFQRLENSKYHLEDKDQNVRYKYNIFNDPDYTDADYYTQYPTIYHLRKELLENPKPHDVRLVYLALLNMFKHRGHFLNSGISDGNNERSLKDAYINFAISVSELTEDYFNQDVDYSTIEGILSSRDLNRTKKAEELSTVLGIDFKNKKYKEYLRAICGLKINAYTLFSDQLPDDTTKIDLCVSDASFDEKSEELVSLIGEDLFQIILNIKEIYDIGSLAGILKGYTYLSQARVAAYDKHKHDLKLLKSSIKKYCTKEEYNNFFNSDADGSYASYIGSFNSGNKERRVGSKRTSEDLYKEIKKLLKGANKSDPAINEFFTSIETESFLPKQLTASNGIIPNQVHSKEMARILTNAENYLPFLKETDENNLSISNRILQLYKFQIPYYIGPVTEKSQRDGGNGWVIRKDNGRVFPWNIEEKIDVKATSEAFISRMVRRCTYMNGNQVLPKASLEYESFRVLNEINNLRIDGERIPVTLKQDIYTDLFQKGKKVTKKQLCNYLATRGLIESSEQVTGIDIAINNSLSTYGKFKAILGEDIKLDHIQHMIEDIVFWCTVYGDSKQFLKEQIEDKYKGKLSPEQMKRILGFKFKDWGNLSKEFFELKGTDKSTGEAVSIIRALWENNLNLMELINSPEFDFKERLADYEANSLKTLSDFEPEDLNEYYFSAPVRRMIWQTTLIIKELVHVLGEEPARIFIEMTREKDASRGRTLSRKKKFEHLYKNVKDENTDWAKVIEHADESGTIRSKKMYLYLTQKGRCMYTGNHIELSDLFNDNLYDIDHIYPRHFVKDDNIDNNLVLVTKEKNAHKSDNYPLEAEIFNKQRNMWTQLRKEGFISEEKYNRLMGRNAFTDEQKAGFIARQLVETSQGTKGVAELFHQLLPNSKLVYAKAGNVSDFRNNRELPKSRLVNDFHHAHDAYLNIVVGNVYYVKFTQNPMNYIKNSYNKDMNKNNYNLSRMFDWDVKRGDEVAWVAQKQDGAAGTISTVKKMLSKNTPLMTRLSYEGKGALANETLYSAEKAKGEGYIPFKSSDAKIQDVTKYGGFTSVTGAYFFLVEHDQKKKRIRTIESVPLYLADKIDKDSSELERYCDKLGLVNYDIRVRKIKIGSLLNRNGYFAYLTGKTGKQLILRNATNLCLDKKWTRYIKKIEKYKETNVLDSIITSETMVNLYNELLNKFTVGIYGRRPNPIGEKMDSAKNTFTSYTLDNQCNLIYQILQLSKILGFETDLSLLRTNKQSGKPTREGGMQISKKIDNTTSMYLINQSPTGLFETKIDLQTI

SEQ ID NO: 3407 - protein, 524 aa, unidentified
  REGION 1..524: note = Category: MG91 effectors
  REGION 1..524: note = Description: MG91-599 effector
  source 1..524: note = uncultivated organism sequence
MNEVFVLELPLQVEKYQADILNKRYEQLRQLYNYVQGKLLRQYRYFEQMKEYQICKTFREKRDFFKSHPFQINEKLKGNKTPFKVSFDEYSLKGYIEKLVQKQVAPNMTYADFGFTTNILDHLGASIWAAWDKMLYDFKAKRISFKKYGELDSFSSRRKVVRGVVYFSGMELHLDTMELAIKMNAKVGKEAKFITLKMLHNPKHADYEMWALKGGVDSVKVVKVVRRLVRSQYKYHVQLTIEGEKPQKGRTLGKGNVGIDLGPTTVAVSGENVVSIDKLVSKCDNIQEEITRLSRKIDRSRRANNPQNFNEDGTIKRGIKLIWNDSKRYKELRRELAELRRKQAAIRKQQHIDRANALLKEGDRFIVENNQISGWTTRAKETKVNENTGKIQKKKRFGKSVANHAPSMFVSILENKVKSLGGEVVKVDTKNAASQYDFTDGSFTKHELRERHVTLSNGDTHQRDMLAAFNLQHLKYDEKDTKQYDTEAMAADYERFCQLEQEEILRYKNKEKKDDRGTIGAEKL

SEQ ID NO: 3408 - protein, 490 aa, unidentified
  REGION 1..490: note = Category: MG91 effectors
  REGION 1..490: note = Description: MG91-600 effector
  source 1..490: note = uncultivated organism sequence
MARENENSGCFVVTFPLKTEKWQEDRIDKILTLLTVRYREKQKILLDRYIHLSHSPEFKEAKKTGLKAFRDFMNEHNFTKYDVEKVFSDSSLSKSVTADIMLTHGINSSIMQELSHRAWSAWEKKLYGQGKFIKLDNEVNIFKSRLKGSTITGFEYSFTDMTLSMNATKPKKHTMFTIPFVVNRKSEYEAYALGCEVRNIAIMRQQIRGKNKYYVQFSFAGTPYNKGRKMGTGIVGIDPGPSKIAIVSDSEIRITTLAPSVNRDERAICRMQRKLDRSRRATNPDNYNDDGTIKRGIKLTFEKSNSYKRTQAKLADTQRKLAAKRKIDHNILANEIIAMGNEFHVENNSFKSMQARSKETKKNDKGKNMSKKRFGKSLANRAPSELLTILKNKVNQYADGDYVDIPSGVACTQFDFTNGEFTKHELKERTITTSDGVVHDRDALAAFNMRFVHKKKIEGKKKIEKDKENFDILAMTDAYRQFCSLEKNIK

SEQ ID NO: 3409 - protein, 504 aa, unidentified
  REGION 1..504: note = Category: MG91 effectors
  REGION 1..504: note = Description: MG91-601 effector
  source 1..504: note = uncultivated organism sequence
MFDAPSGADHLIKMRATAEWQTARAMPKSSERTKAFRDLRVRFRLSEYDFHADVAMHRKASGRGHLLGINECQKLASRAWISVERHLYNGGSPRFISSRRGLHSIEGKTNRTGIIWKADQQCVTVCKHVYRVRVDKRDDWLTRALQDPTDPTKPRKVKYCRIVREMRKGKERFLLQLVAEGTSPLKHAYAGKDLRMAIDPGLGSLTYATEDGTIAKVQIAPSADTDHRAIRRIQRAMERSRRATNPDNYEAVDVVRHGKKKKSFKVKSGRLQWRFSKRYESLRAELAEIFRLSAATRKREHGEVCNWLLGHAGHIIVEDNSYKAFQRGRFGKTIGRHAPAALYAQLASKAESAGLLVEVVSPKKLKPSQHNLLTDTFVKHELWERRVRLGNDDDDRWIDRDAAACLNLLYADLEKQTYAPERIREAVLAGVTAWLDAGVVVIQAREGITEREFGRFRRRGIPSLTVQGLRQQGFRGRSDSKSGATPRRKASTVSKPSHFSGEVV

SEQ ID NO: 3410 - protein, 529 aa, unidentified
  REGION 1..529: note = Category: MG91 effectors
  REGION 1..529: note = Description: MG91-602 effector
  source 1..529: note = uncultivated organism sequence
MNTPSFVIELPIRTDDHERRTIVGKLEYARCLHNATLGTALGQLQQMRQDPAWKKACRMPKGKERTNAFRTLDRQYGLTEYDLHAVIARHRQGSGRKEELGINETQKIATRIFQAVSRYKLGLGGRPRFKSQSRGLHSIEGKTNKTGLKFKPETSTLDWCGHEYRVLIDQRDGYLQRALREEADPKRWRKVKYCRLVRKRIRGKERFYLQVVLEGTAPLKRVYAPVVERLAIDPCPQTVAVFCPRFAGKIEVAPHAKVNEAELRVLQRSMDRSLRSCNPKAYNEDGTIKPGVELVKSKGYLKRVARLQELYRKAAATRKCDHGQLINLLLCLAGEIRIEKNSWAAFQRSHFGKSLGRSGVADCLSQLKAKAESAGLKVIEAAPYKLKLSQYDPYTDSFQKKQLNERWHRAGTGDEYIPRDVLSAALLYCADLETQSHIPKAALALLEGAKQLLKDAGYWITKPTSSQDSRDPRFAPEPKALTPETVRLEIFGGTGDSPLQPSCPNGSKGAEGKVSACSKETFPLQRGVV

SEQ ID NO: 3411 - protein, 525 aa, unidentified
  REGION 1..525: note = Category: MG91 effectors
  REGION 1..525: note = Description: MG91-603 effector
  source 1..525: note = uncultivated organism sequence
MEEVFVLELPLQVEKYQEDILNKRYEQLRQLYNYVQGKLLRQYRYFEQMKEYQTCKTFKEKRDFFRSHPFHINGVYGNNKELLDITFDEYGINGFVGKMGKKLVNADTTYADLGITSTLLDRLSLAIWAAWEKMLYDYHAKRISFKKYGELNIFGSRKKTNGSGKKMFSGMELHLETMTLSIKLNGKVGKNAKFITLPILHNPKHVDYEMMALKGGFDSVKVITVVRRMVRGRYKYYLQMSIEGEKPKKGRTLGKGNVGIDLGPTTIAVSSENIASIDKLASKCDNIEVEKKRLGRKIDRSRRANNPGNFNEDGTIKRGVRLTWNDSKRYKALRREMAELQRRQAAIRKQQHINRANALLKEGNTFIVENNQISGWTRKAKETKVNEKTGRIQKKKRFGKSVANHAPAMFVTILENKVKSLGGEVVKVDTQNAASQYDFTNNSFEKHELKERSVTLSNGDIHQRDMLAAFNLQHLKYDESEKKQYDREAMAQHYERFCELEQEEIMRYKSKEKKDDRSTIGAEKL

SEQ ID NO: 3412 - protein, 484 aa, unidentified
  REGION 1..484: note = Category: MG91 effectors
  REGION 1..484: note = Description: MG91-604 effector
  source 1..484: note = uncultivated organism sequence
MAHKENQKAFVVTFPLRTEKWQEDRIDKMMRMLTTFYNDRQRKLVRRYIYLSHSKAYKEAKGKGVVAFKNYMKEHGFSQYGLDAFFKADTKGALYQCGLNSMFLQYLSQCAWSAWDKKLFGKGDFVKTDKVVNIFCSRNMKGRFCGFDYDLRTFTIRIKSICTKEIICSIPFVVNKNSEYELYALSQKICRIGIVRKLIRSKYKYYVQFTFDGVPYNKGRNIGTGIVGIDPGPSKIAIVGDKKVEIAKLAPNIIEDERKTARLKRKLDRSRRATNPHMYKEDGTNIKGQRQICFSKSYNETRKQLADAQRKLAAKRKIAHNELANTLLEYGDTFKVEANSYKSMQARTKATSMTKSGRIRSKKRYGKSIKNRAPSEFLVILKNKLLYYPKGKYYDVPSSYACTQFDFTNESFTEHKISERRIVTSDGIQHNRDTLAAFNIKNAIVNDTSTKKKKVTKSKEFFDIVKMKASYNEFCVMEHYLLSE

SEQ ID NO: 3413 - protein, 530 aa, unidentified
  REGION 1..530: note = Category: MG91 effectors
  REGION 1..530: note = Description: MG91-605 effector
  source 1..530: note = uncultivated organism sequence
MTSQSFVIELPIAVDDAEMRTIVRKLEFARQLHNATLGTAMGQLQLMRQDAAWKEACVMPKGKERAAAFRALDRKYGLTEYDLHSVIARHREGTGRKAELGINETQKIATRVFQAINRYKLGLGGMPRFKSFKRGLHSIEGKTNKTGLKFKPEQKVLNWCGHDYRVLIDPKDDYIQRALKDNERSDQYRKIKYCRLVRRRIRSADRFFLQVVLEGTAPVKHVYAPVTERAAIDPGPQSIALFSKAFAGKIQVAGSNNFNEAASRRLLRAMDRSLRRNNPDAYNEDGTINKGVKLAKSKNYQRKVDRLHEMHRVAAAQRKCRHGQTINLLLSIAGDIRIEKNSWKAFQRGHFGKSLGKSAMSGFIAQLKSKAESAGLKVTEVNPYKLKLSQYDPYTDTYRKKDLSERWQEMKAGSGQYIQRDVLSALLLYCADIEKEIHIPKAAVEQLEGAKQLLTDAGYVVLKSTSSRDQRDPRLASEPKAMTPEMARQKILRGAGDSHLPTDQELGRIRAGGKVSTWSKETFPLQRGVV

SEQ ID NO: 3414 - protein, 405 aa, unidentified
  REGION 1..405: note = Category: MG91 effectors
  REGION 1..405: note = Description: MG91-606 effector
  source 1..405: note = uncultivated organism sequence
MPRFKSSKRGLHSIEGKTNKTGLKFRPEKKVLNWCGHDYRVLIDPKDDYIQRALKENERSDKYRKIKYCRLVRKRIRSSDRFFLQVVLEGTAPVKHVYAPVTERAAIDPGPQSIALFSKEFAGKIQVAGSNNFNEAVSRRLLRAMDRSLRRNNPDAYNEDGTIKKGAKLVKSKNYQRKVDRLREMHRVAAAERKCRHGQTINLLLSIAGDIRIEKNSWKAFQRGHFGKSLGKSAMSGFIAQLKSKAASAGLKVTEVNPYKLKLSQYDPYTDTYRKKDLSERWQEMKAGSGLYIQRDILSALLLYCADIEKEIHIPKVAVEQLEGTKQFLTDAGYVVLKSTSSRDQRDPRLASEPKAMTPEMARQKIFRGAGDSHLPTDQELGQIRAGGKVSTWSKETFPLQRGVV

SEQ ID NO: 3415 - protein, 529 aa, unidentified
  REGION 1..529: note = Category: MG91 effectors
  REGION 1..529: note = Description: MG91-607 effector
  source 1..529: note = uncultivated organism sequence
MNTPSFVIELPIRTDDHERRTIVGKLEYARCLHNATLGTALGQLQQMRQDPAWKKACRMPKGKERTNAFRALDRQYGLTEYDLHAVIARHRQGSGRKEELGINETQKIATRIFQAVSRYKLGLGGRPRFKSQSRGLHSIEGKTNKTGLKFKPETSTLDWCGHEYRVLIDQRDGYLQRALREEADPKRWRKVKYCRLVRKRIRGKERFYLQVVLEGTAPLKRVYAPVVERLAIDPCPQTVAVFCPRFAGKIEVAPHAKVNEAELRVLQRSMDRSLRSCNPKAYNEDGTIKPGVELVKSKGYLKRVARLQELYRKAAAARKCDHGQLINLLLCLAGEIRIEKNSWAAFQRSHFGKSLGRSGVADCLSQLKAKAESAGLKVIEAAPYKLKLSQYDPYTDSFRKKQLNERWHRAGTGDEYIQRDVLSASLLYCADLETQSHIPKAALALLEGAKQLLKDAGYWVSKPTSSQDPCDPRFAPEPKALTPETVRLEIFGGTGDSPLQPSCPNGSKGAEGKVSACSKETFPLQRGVV

SEQ ID NO: 3416 - protein, 525 aa, unidentified
  REGION 1..525: note = Category: MG91 effectors
  REGION 1..525: note = Description: MG91-608 effector
  source 1..525: note = uncultivated organism sequence
MEEVFVLELPLQVEKYQEDILNKRYEQLRQLYNYVQGKLLRQYRYFEQMKEYQTCKTFKEKRDFFRSHPFHINGVYGNNKELLDITFDEYGINGFVGKMGKKLVNADTTYADLGITSTLLDRLSLAIWAAWEKMLYDYHAKRISFKKYGELNIFGSRKKTNGSGKKMFSGMELHLETMTLSIKLNGKVGKNAKFITLPILHNPKHVDYEMMALKGGFDSVKVITVVRRMVRGRYKYYLQMSIEGEKPKKGRTLGKGNVGIDLGPTTIAVSSENIASIDKLASKCDNIEVEKKRLGRKIDRSRRANNPGNFNEDGTIKRGVRLTWNDSKRYKALRREMAELQRRQAAIRKQQHINRANALLKEGDTFIVENNQISGWTRKAKETKVNEKTGRIQKKKRFGKSVANHAPAMFVTILENKVKSLGGEVVKVDTQNAASQYDFTNNSFEKHELKERSVTLSNGDIHQRDMLAAFNLQHLKYDEAEKKQYDREAMAQHYERFCELEQEEIMRYKSKEKKDDRSTIGAEKL

SEQ ID NO: 3417 - protein, 544 aa, unidentified
  REGION 1..544: note = Category: MG91 effectors
  REGION 1..544: note = Description: MG91-609 effector
  source 1..544: note = uncultivated organism sequence
MNLDSRVMNVSPRIVIRQSKVKEVFVLELPLRVEKYQADLLNKRFEQLRQLYNYVQGKLLRQYRYFEQMKEYQACKTFKEKKDFFRKHPFHINGILGSNKKPLNITFDEYGIRGFVEKLVQKGVGASMTYADLGFTTSILDHLSSGIWSAWDKMLYDYKARRISFRKYGELDSFSSRRKVVQGKIYFSGMELHLDSMMLSVKMNGKIGKAAKFITLPILHNPKHANYEMWALRGGLDSVKVVKVVRRLIRGQYKYYFQMTIEGEKPQKGRTLGKGNVGIDLGPTTVAVSSENIVSIDKLASKCDSIEAEKAKLGRKIDRSRRANNPQNFNEDGTIKRGVRLVWNDSKRYKALRGEMAELQRRQSAIRKQQHIDRANELLKEGDIFIVENNQISGWTRKAKETRVDESTGRIRKKKRFGKSVANHAPSMFVNILENKVKSLGGQLVKVDTQNAASQYDFTDGSFTKHELQERNVTLSNGDTHQRDMLAAFNLQHLKYDEAEKKQYDREAMSKHYERFCELEQAEILRYKNKEKVDDRSTIGAKEL

SEQ ID NO: 3418 - protein, 530 aa, unidentified
  REGION 1..530: note = Category: MG91 effectors
  REGION 1..530: note = Description: MG91-610 effector
  source 1..530: note = uncultivated organism sequence
MTSQSFVIELPIAVDDAEMRTIVRKLEFARQLHNATLGTAMGQLQQMRQDAAWKEACVMPKGKERAAAFRALDRKYGLTEYDLHSVIARHREGSGRKAELGINEAQKIATRVFQAINRYKLGLGGMPRFKSSKRGLHSIEGKTNKTGLKFRPEKKVLNWCGHDYRVLIDPKDDYIQRALKENERSDKYRKIKYCRLVRKRIRSSDRFFLQVVLEGTAPVKHVYTPVTERAAIDPGPQSIALFSKAFAGKIQVAGPNNFNEAASRRLLRAMDRSLKRNNPDAYNEDGTIKKGAKLVKSKNYQRKVDRLREMHRVSAAERRCLHGQTINLLLSIAGDIRIEKNSWKAFQRGHFGKSLGKSAMSGFIAQLKSKAASAGLKVTEVNPYKLKLSQYDPYTDTYRKKDLRERWQEMKAGSGLYIQRDILSALLLYCADIEKEIHIPKVAVEQLEGAKQFLTDAGYVVLKSTSSRDQRDPRLASEPKAMTPEMARQKILRGAGDSHLPTDQALGRIRAGEKVSTWSKETFPLQRGVV

SEQ ID NO: 3419 - protein, 530 aa, unidentified
  REGION 1..530: note = Category: MG91 effectors
  REGION 1..530: note = Description: MG91-611 effector
  source 1..530: note = uncultivated organism sequence
MTSPSFVIELPIAVDDAEMRTIVRKLEFARQLHNATLGTALGQLQQMRQDTAWKQACAMPKGKERTAAFRALDRKYGLTEYDLHSVIARHREGTSRKAELGINETQKIATRVFQAINRYKLGLGGMPRFKSSKRGLHSIEGKTNKTGLKFRPEKKVLNWCGHDYRVLIDPKDDYIQRALKENERSDKYRKIKYCRLVRKRIRSADRFFLQVVLEGTAPVKHVYAPVTERAAIDPGPQSIALFSKAFAGKIQVAGSNNFNEAASRRLLRAMDRSLRRNNPDAYNEDGTIKKGAKLVKSKNYQRKVDRLREMHRVAAAERKCRHGQTINLLLSIAGDIRIEKNSWKAFQRGHFGKSLGKSAMSGFIAQLKSKAASAGLKVTEVNPYKLKLSQYDPYTDTYRKKDLSERWQEMKAGSGQYIQRDILSALLLYCADIEKEIHIPKVAVEQLEGAKQLLTDAGYVVLKSTSSRDQRDLRLAPEPKAMTPEMARQKILRGAGDSHLPTDQELGRIRAGGKVSTWSKETFPLQRGVV

SEQ ID NO: 3420 - protein, 1358 aa, unidentified
  REGION 1..1358: note = Category: MG91 effectors
  REGION 1..1358: note = Description: MG91-612 effector
  source 1..1358: note = uncultivated organism sequence
MEKEYYLGLDMGTNSVGWAVTDDAYNLIRFKGKDMWGIREFDEANPAVERRTHRTSRRRKQRNAVRMGLIRSYFADEIQKVDSNFYQRLDNSFFHVEDKQDNVKDKNGIFNDKNYKDADYYKQYPTIFHLRKELIEDASQKDVRLVYLAVANMFKHRGHFLLSGIGSESSKQTITDLYNQVSGLITEEYGISLKTDIAGTDFEQVLCSREYSRTRKSEKVCEILEIKNSDKLKKAFVKSMCGLSVKITDIIDDTFTEISDEDKKITFSFVDSDYDEKAGVLEEKLGTDVYDIISKLKEIHDKAQVAEIMKNYQYLSFARVADYEKHKKDLKILKRVVKKYFEPTVYDKLFRSEENGTYSAYVNSFNSEEKSRRNYKERKQEDLYNSIKKLLKSVDNVDDTDIEYIKNEMDKENFLPKQLTFKNGVIPNQIHASELKAILKNAEKYLPFLNEKDESGYTVSERILMLFSFQIPYYVGPVSSNSNGWVKRLEPGQVLPWNIDKKIDLKETSEQFIQRMVRNCTYIAGEKVLPKASLLYENFKVLNEINNLSINGERITVNLKQDLYNTLFLKGKRVTRKQIFNYFHSRGLVEEDSQISGIDIAVNNSLSTYGKFLPLFGEHLKEDKYKKMVDDIVFWCTVYGDSRKFLREQLEEKYSDVLDENQIKRITGMKFKDWGNLSKEFLELSGCCKSTGEVMPLIRAMWETNYNLMELLHSEEFTYSEELEEKQGKIEKVLSEYTIDDLNEEYFSAPVKRMVWQTLLIIKEIEKIMKCPPTRIFVEMTRKDDEKGDNGRKSSRKDQLLALYKKIQSEDKEWKKEMSSRIEDYDKKGALRSKKLYLYFIQKGLDMYTGKPIDLDNLMSANSNYDIDHIYPRHFVKDDNINNNLVLASKPANAEKSDIYPIKDSIYQKMKYTWKVLRDEGLITEEKYKRLTGRNPFTDEQKAGFIARQLVETGQGTKGVADLLTALLPDTKLVYSKAGNVSDFRKKYDIPKSRLINDFHHAHDAYLNIVVGNIYFTKFTSNPLNYIRKECLSKDNKYQYNLGNMYKWDVKRDGKTAWIAAKEGETGTIATVKKMLSRNTPTLTRLTIEGHGGIADATLYSHKKAKQDAYIPLKSSDARMADVTKYGGYSSVTTAYLFLVEHEIKGKKIRTLETVPLYLKDRLENSKEKLEEYCRETLGYTNPSVRMKKIKLQSLIKLNGYYMQISGKTNKQFTVRNYVQFCLNSKWVDYIHKLEKYQDKGVIDDAITDEKNVELYNVLCEKHSVGIFTLRPNPVGDKIKKGYDKFVNLTTEEQIKLLIEIIKLTCVGIVSANLTLIGGASISGKMLISKNITDAKECLLINQSVTGLYENRIDLLRV

SEQ ID NO: 3421 - protein, 537 aa, unidentified
  REGION 1..537: note = Category: MG91 effectors
  REGION 1..537: note = Description: MG91-613 effector
  source 1..537: note = uncultivated organism sequence
MSTKSFTINLPIITGDQDRRRLQKSFSFGCNLQNAVMGGGWDCVLKMRATPEWQAARAMPKGSERTKAFRDLRVQFRLSEYDFHADVAMHRKASGRGHLLGINECQKLASRAWISVERHLYNGGSPRFISSRRGLHSIEGKTNRTGIIWKADQQCVTVCKRVYRVRVDKRDDWLTRALQDPTDPKKPRKVKYCRIVREMRKGKERFLLQLVAEGTSPLKHAYAGKDLRMAIDPGLGSLTYATEDGTIAKVQIAPSADTDHRAIRRIQRAMERSRRATNPDNYEAVDVVRHGKKKKSFKVKSGRLQWRFSKRYESLRAELAEIFRLSAATCKREHGEVCNWLLGHAGHIIVEDNSYKAFQRGRFGKTIGRHAPAALYAQLTNKAESAGLLVEVVSPKKLKPTQHNLLTGQFVKHELWERRVRLGNDDDDRWIDRDAAACLNLLYADLEKQTYAPERIREAVLAGVTAWLDAGVVVIQAREGITEREFGRFRRRGIPSLAVQGLRQQGFRGRSDSKSGVTPRRKASTVSKPSHFSGEVV

SEQ ID NO: 3422 - protein, 530 aa, unidentified
  REGION 1..530: note = Category: MG91 effectors
  REGION 1..530: note = Description: MG91-614 effector
  source 1..530: note = uncultivated organism sequence
MTSPSFVIELPIAVDDAEMRTIVRKLEFARQLHNATLGTALGQLQQMRQDTAWKQACAMPKGKERTAAFRALDRKYGLTEYDLHSVIARHREGTSRKAELGINETQKIATRVFQAINRYKLGLGGMPRFKSSKRGLHSIEGKTNKTGLKFRPEKKVLNWCGHDYRVLIDPKDDYIQRALKENERSDKYRKIKYCRLVRKRIRSADRFFLQVVLEGTAPVKHVYAPVTERAAIDPGPQSIALFSKAFAGKIQVAGSNNFNEAASRRLLRAMDRSLRRNNPDAYNEDGTIKKGAKLVKSKNYQRKVDRLREMHRVAAAERKCRHGQTINLLLSIAGDIRIEKNSWKAFQRGHFGKSLGKSAMSGFIAQLKSKAASAGLKVTEVNPYKLKLSQYDPYTDTYRKKDLSERWQEMKAGSGQYIQRDILSALLLYCADIEKEIHIPKVAVEQLEGAKQFLTDAGYVVLKSTSSRDQRDPRLASEPKAMTPEMARQKILRGAGDSHLPTDQALGRIRAGGKVSTWSKETFPLQRGVV

SEQ ID NO: 3423 - protein, 506 aa, unidentified
  REGION 1..506: note = Category: MG91 effectors
  REGION 1..506: note = Description: MG91-615 effector
  source 1..506: note = uncultivated organism sequence
MVVEVKFSPMTSPTFIIELPIRVSDSESRTILRKLEFARQLHNATLGTALGQLQQLRQDSEWEKACLMPKGKERSELFRKLDRKYQLTEYDLHTVIAKHRPRSGRKTELGINETQKIATRVFQAVNRYKLGLGGRPRFKSLSRGLRSIEGKSNKTGLKFNIEKSVLSWCKHDYRVFIDPQDDFLQRALRSEGRSGFKKVKYCRLVRKTIKGKNRFYLQVVLEGQAPIKHIYASTSERLSIDPGPQTIAVFSDVWAGKIKVSPTAQVDEKRLRCIQRSMDRSLRKSNPDCYESDGTLRKGCVLKKTKGYEKRIQRLQECHRKAAATRRCEHGQLINLLLSMAGDIRVEKNQWKAFQRGHFGKSLGKSGISGFIERLKSKAESAGLKVTEVKPYKLKLSQYDPYTDQYRKKSLNERWHSLGESSEWIQRDVMSALLLQCADLEEEKHIPTEVIKTLEGVKQLLRDAGYVILKPSSNGESNPTFASEPKAVTPEKVRLEIFCGASDSYL

SEQ ID NO: 3424 - protein, 524 aa, unidentified
  REGION 1..524: note = Category: MG91 effectors
  REGION 1..524: note = Description: MG91-616 effector
  source 1..524: note = uncultivated organism sequence
MNEVFVLELPLLVERYQADILNKRYEQLRQLYNYVQGKLLRQYRYFEQMKEYKACEKIKEKRDFFRAHPFHINGVLNGNKEQLDITFDKNGINGFVEKLAQKSAGPNITYADLGFTTYILDHLSASIWAAWEKKLYDFKAKRISFKKYGELDSFSSRRKVVGGKVYFSGMELHLDTMKLSIKMNGKQGDNAKFITLKMLHNTKHADYEMWALKGGVDSVKVVKVVRRLVRSQYKYYVQLTIEGEKPQKGRKLGKGNVGIDLGPTTVAVSGENVVSIDKLASKCDNIQEEITRLSRKIDRSRRANNPQNFNEDGTIKRGIKLIWNDSKRYKELRRELAELRRKQAAIRKQQHIERANALLKEGDTFIVENNQISGWTTRAKETKVNEKTGKIQKKKRFGKSVANHAPSMFVSILENKVKSLGGEVVKVDTKNAASQYDFTDNCFTKHELKERNVTLSNGDTHQRDMLAAFNLQHLKYDEAEAKQYDTEAMAANYERFCQLEQEEIQRYKNKEKKDDRSTIGAEKL

SEQ ID NO: 3425 - protein, 530 aa, unidentified
  REGION 1..530: note = Category: MG91 effectors
  REGION 1..530: note = Description: MG91-617 effector
  source 1..530: note = uncultivated organism sequence
MRTSSIIVSYELTLPQRIYPHLDRLFSVFGRSVRDFIDRFWNESTLELLSQKGHVCSILKEIVQKPQNLPSRVFRNALELSGQILRSQIERKKLFDTFMQYPCLVLYDEKEIAKSLNTSIWFALNVKRQVLKLLRKGERGDYFSLVKPSFSNSVVITSADDSLERGQFKKLRIEKNKLLFELKVPIGNTWKWVKVTKFIPDRLRKALRNAKEIKAPLIKRVTLKSDFTIYRLVIPVEVELRVKNRVERVFALDLSPSEKRLGVGVVVDKEGHSKPVLFTAYKMVRKLERLYGEISGLERKIDNIADDLHSTFKKGHKERLNQRLRHLYQEQKLRWRKFKELRKQILETFINLVIAHAKAYSCDAIAIEDLKFKDLPDWENKRFRRLFSTWFYSRLEERLRHKAQREGIKVLSVNPFNTSQVCHECGSKGKANRFEFVCESCGKRFDRDYNASVNIGIKALTLACKTKSKPYMGEDIPARVSSLQVLTRYKFKALLTLLSFLKLLAYLRLVETSYLKLKSLLKCISADKYG

SEQ ID NO: 3426 - protein, 525 aa, unidentified
  REGION 1..525: note = Category: MG91 effectors
  REGION 1..525: note = Description: MG91-618 effector
  source 1..525: note = uncultivated organism sequence
MEEVFVLELPLQVEKYQEDILNKRYEQLRQLYNYVQGKLLRQYRYFEQMKEYQTCKTFKEKRDFFRSHPFHINGVYGNNKELLDITFDEYGINGFVGKMGKKLVNADTTYADLGITSTLLDRLSLAIWAAWEKMLYDYHAKRISFKKYGELNIFGSRKKTNGSGKKMFSGMELHLETMTLSIKLNGKVGKNAKFITLPILHNPKHVDYEMMALKGGFDSVKVITVVRRMVRGRYKYYLQMSIEGEKPKKGRTLGKGNVGIDLGPTTIAVSSENIASIDKLASKCDNIEVEKKRLGRKIDRSRRANNPGNFNEDGTIKRGVRLTWNDSKRYKALRREMAELQRRQAAIRKQQHINRANALLKEGNTFIVENNQISGWTRKAKETKVNEKTGRIQKKKRFGKSVANHAPAMFVTILENKVKSLGGEVVKVDTQNAASQYDFTNNSFEKHELKERSVTLSNGDIHQRDMLAAFNLQHLKYDEAEKKQYDREAMAQHYERFCELEQEEIMRYKSKEKKDDRSTIGAEKL

SEQ ID NO: 3427 - protein, 529 aa, unidentified
  REGION 1..529: note = Category: MG91 effectors
  REGION 1..529: note = Description: MG91-619 effector
  source 1..529: note = uncultivated organism sequence
MKEVFVLELPLQVEKYQADILNKRYEQLRQLYNYVQGKLLRQYRYFEQMKDYQACKAFKEKREFFKTHPFHINGVLGRNKELLDITFNEYGILGWVTKLGQMSIGSGKTYADIGITARILANLSDNIWSAWNKKLYDYRSERISFKKYGSLNTFGSGKTILKKGKEIKEYFSGMVLHLERMEIDIKTNGSNGKNATFISLPILHNPKHADYEMMALSGGSSSIKVLTIVRRLVRGQYKYYLQLSIEGEKPQKGRTLGKGNVGIDLGPTTIAVSGENVVSIDKLASKCDNIQTEITKLARKIDRSRRANNPQNFNEDGTIKRGIKLVWNDSKRYKELRRELAELCRKQAAIRKQQHIDRANALLKEGDTFIVENNPVKAWAARAKETKVNEKTGKIQSKKRGGKSIGNHAPAMFVDILENKVKSLGGTFIRANTNNAASQYDFSNNSFKEGEDRHGLNERAITLSNGNTHQRDMLAAFNLQHLTDEKKQYDVEAMKRDYERFCQLEQEEIQRYKNKEKKDDRSTIGAEKL

SEQ ID NO: 3428 - protein, 537 aa, unidentified
  REGION 1..537: note = Category: MG91 effectors
  REGION 1..537: note = Description: MG91-620 effector
  source 1..537: note = uncultivated organism sequence
MSTKSFIISLPIITGDQDRRRLRKSFSFGCNLQNAVMGGGWDRVLKMRATAEWQTARAMPKNSERTKAFRDLRVRFRLSEYDFHADVAMHRKASGRGHLLGINECQKLASRAWISVERHLYNGGSPRFISSRRGLHSIEGKTNRTGIIWKADQQCVTVCKRVYRVRVDKRDDWLTRALQDPTDPTKPRKVKYCRIVREMRKGKERFLLQLVAEGTSPLKHAYAGKDLRMAIDPGLGSLTYATEDGTIAKVQIAPSADTDHRAIRRIQRAMERSRRATNPDNYEAVDVVRHGKKKKSFKVKSGRLQWRFSKRYESLRAELAEIFRLSAATRKREHGEVCNWLLGHAGHIIVEDNSYKAFQRGRFGKTIGRHAPAALYAQLTNKAESAGLLVEVVSPKKLKPTQHNLLTGQFVKHELWERRVRLGNDDDDRWIDRDAAACLNLLYADLEKQTYAPERIREAVLAGVTAWLDAGVVVIQAREGITEREFGRFRRRGIPSLTVQGLRQQGFRGRSDSKSGTTPRRKASTVSKPSHFSGEVV

SEQ ID NO: 3429 - protein, 525 aa, unidentified
  REGION 1..525: note = Category: MG91 effectors
  REGION 1..525: note = Description: MG91-621 effector
  source 1..525: note = uncultivated organism sequence
MEEVFVLELPLQVEKYQEDILNKRYEQLRQLYNYVQGKLLRQYRYFEQMKEYQTCKTFKEKRDFFRSHPFHINGVYGNNKELLDITFDEYGINGFVGKMGKKLVTADTTYADLGVTSTLLDRLSLAIWAAWEKMLYDYHAKRISFKKYGELNIFGSRKKTNGSGKKMFSGMELHLETMTLSIKLNGKVGKNAKFITLPILHNPKHVDYEMMALKGGFDSVKVITVVRRMVRGRYKYYLQMSIEGEKPKKGRTLGKGNVGIDLGPTTIAVSSENIASIDKLASKCDNIEVEKKRLGRKIDRSRRANNPGNFNEDGTIKRGVRLTWNDSKRYKALRREMTELQRRQAAIRKQQHINRANALLKEGDTFIVENNQISGWTRKAKETKVNEKTGRIQKKKRFGKSVANHAPAMFVTILENKVKSLGGEVVKVDTQNAASQYDFTNNSFEKHELKERSVTLSNGDIHQRDMLAAFNLQHLKYDESEKKQYDREAMAQHYERFCELEQEEIMRYKSKEKKDDRSTIGAEKL

SEQ ID NO: 3430 - protein, 524 aa, unidentified
  REGION 1..524: note = Category: MG91 effectors
  REGION 1..524: note = Description: MG91-622 effector
  source 1..524: note = uncultivated organism sequence
MYEVFVLELPLQVEKYQADILNKRYEQLRQLYNYVQGKLLRQYRYFEQMKEYQACKTIKEKRDFFKSHPFQVNESLCGDKSAFEISFNEFSIKGFIEKLVQKSVGANMTYADLGFTTNILDHLGASVWAAWDKKLYDFKAKRISFKKYGELDSFSSRRKVVGGKVYFSGMELHLDTMELAIKMNGKQGNNAKFITLKMQHNPKHAEYEMWALKGGVDSVKVVKVVRRLVRSQYKYYVQLTIEGEKPQKGRTLGMGNVGIDLGPTTVAVSGENVVSIDKLASKCDNIQEEITRLSRKIDRSRRANNPQNFNEDGTIKRGVKLIWNDSKRYKELRRELAELRRKQAAIRKQQHIDRANAILKEGDTFIVENNQISSWTTRAKETKVNEKTGKIQKKKRFGKSVANHAPSMFVSILENKVKSLGGEVVKVDTKNAASQYDFTDGSFTKHELKERNVTLSNGDTHQRDMLAAFNLQHLKYNEAEAKQYDTEAMAADYERFCQLEQEEIQRYKNKEKKDDKGTIGAEKL

SEQ ID NO: 3431 - protein, 530 aa, unidentified
  REGION 1..530: note = Category: MG91 effectors
  REGION 1..530: note = Description: MG91-623 effector
  source 1..530: note = uncultivated organism sequence
MPSQSFVIELPIAVDDAEMRTIVRKLEFARQLHNATLGTAMGQLQQMRQDAAWKEACVMPKGKERAAAFRALDHKYGLTEYDLHSVIARHREGSGRKAELGINETQKIATRVFQAINRYKLGLGGMPRFKSSKRGLHSIEGKTNKTGLKFRPEKKVLNWCGHDYRVLIDPKDDYIQRALKENERSDKYRKIKYCRLVRKRIRSSDRFFLQVVLEGTAPVKHVYAPVTERAAIDPGPQSIALFSKEFAGKIQVAGSNNFNEAASRRLLRAMDRSLRRNNPDAYNENGTIKKGAKLVKSKNYQRKVDRLREMHRVAAAERKCRHGQTINLLLSIAGDIRIEKNSWKAFQRGHFGKSLGKSAMSGFIAQLKSKAASAGLKVTEVNPYKLRLSQYDPYTDTYRKKDLSERWQEMKAGSGLYIQRDVLSALLLYCADIEKEIHIPKVAVEQLEGAKQFLTDAGYVVLKSTSSRDQRDPRLASEPKAMTPEMARQKILRGAGDSHLPTDQELGQIRAGGKVSTWSKETFPLQRGVV

SEQ ID NO: 3432 - protein, 525 aa, unidentified
  REGION 1..525: note = Category: MG91 effectors
  REGION 1..525: note = Description: MG91-624 effector
  source 1..525: note = uncultivated organism sequence
MEEVFVLELPLQVEKYQEDILNKRYEQLRQLYNYVQGKLLRQYRYFEQMKEYQTCKTFKEKRDFFRSHPFHINGVYGNNKELLDITFDEYGINGFVGKMGKKLVNADTTYADLGITSTLLDRLSLAIWAAWEKMLYDYHAKRISFKKYGELNIFGSRKKTNGSGKKMFSGMELHLETMTLSIKLNGKVGKNAKFITLPILHNPKHVDYEMMALKGGFDSVKVITVVRRMVRGRYKYYLQMSIEGEKPKKGRTLGKGNVGIDLGPTTIAVSSENIASIDKLVSKCDNIEVEKKRLGRKIDRSRRANNPENFNEDGTIKRGVRLTWNDSKRYKALRREMAELQRRQAAIRKQQHINRANALLKEGDTFIVENNQISGWTRKAKETKVNEKTGKIQKKKRFGKSVANHAPAMFVTILENKVKSLGGEVVKVDTQNAASQYDFTNNNFKKHELNERSVTLSNGDTHQRDMLAAFNLQHLKYDEAEKKQYDREAMSKHYERFCELEQAEIVRYKNKEKADDRSTIGAKEL

SEQ ID NO: 3433 - protein, 491 aa, unidentified
  REGION 1..491: note = Category: MG91 effectors
  REGION 1..491: note = Description: MG91-625 effector
  source 1..491: note = uncultivated organism sequence
MRATAEWQTARAMPKSSERTKAFRDLRVHFRLSEYDFHADVAKHRKASGRGHLLGINECQKLASRAWISVERHLYNGGSPRFISSRRGLHSIEGKTNRTGIIWKADQQCVTVCKRVYRVRVDKRDDWLTRALQDPTDPTKPRKVKYCRIVREMRKGKERFLLQLVAEGTSPLKHAYAGKDLRMAIDPGLGSLTYATEDGTIAKVQIAPSADTDHRAVRKLQRAMERSRQATNPDNYETVEVVRHGKKHKSLKVKSGRLQWRFSKRSENLRAELAEIFRLSAATRKREHGEICNWLLDHAGHIIVEDNSYKAFQKGHFGKSIRRHAPAAFYTQLTSKAESAGLQVTVVSPRKLKPSQHNLLTDTFVKHELWERRVRLGNDDDDRWIDRDAAACLNLLYADIDKQTYDPKRIREAVLAGVTAWLDAGVVVIQAREGITEREFGRFRRRGIPSLTVQGLRQQGFRGRSDSKSGTTPRRKASTVSKPSHFSGEVV

SEQ ID NO: 3434 - protein, 531 aa, unidentified
  REGION 1..531: note = Category: MG91 effectors
  REGION 1..531: note = Description: MG91-626 effector
  source 1..531: note = uncultivated organism sequence
MNEVFVLELPLQVEKYQADILNKRYEQLRQLYNYVQGKLLRQYRYFEQMKEFQDCKTFKAKREFIKAHPFQIKGVMGRNKELLDIFFDEYGILGLITKLGQKPIGSGKTYTDMGISSTILANLSNSIWSSWNKKLYDYHADRISFKKYGGLNTFGSGKIIQKKDNEVKEYFPGMVLHLDRMEIDIKTNGGLGKKATFITLPILHNPKHADYEMNALSGGSSSIKVLTIVRRMIRGQYKYYLQMSIEGEKPQKGRLLGKGNVGIDLGPTTVAVSGENIVSIDKLASKCDDIQEVITRLSRKIDRSRRANNPQNFNEDGTIKRGIKLVWNDSKRYKELRRELAELRRKQAAIRKQQHIDRANALLKEGDTFIVENNQISSWTTRAKETKVNEKTGKIQKKKRFGKSIANHAPSMFINILENKVKSLGGKVVKGDTKNAASQYDFTDGSFTKHELKERNVTLSNGDTHQRDMLAAFNLQHLKYNEAEAKQYDTEAMAADYERFCQLEQEEILRYKNKEKKDDRSTIGAEELLKT

SEQ ID NO: 3435 - protein, 410 aa, unidentified
  REGION 1..410: note = Category: MG91 effectors
  REGION 1..410: note = Description: MG91-627 effector
  source 1..410: note = uncultivated organism sequence
MRATAEWQTARAMPKNSERTKAFRDLRVRFRLSEYDFHADVAMHRKASGRGHLLGINECQKLASRAWISVERHLYNGDAPRFISSRRGLHSIEGKSNRTGIIWKADQQCVTVCKRVYRVRVDKRDDWLTRALQDPTDPKKPRKVKYCRIVREMRKGKERFFLQLVAEGTSPLKHAYAGKDLHMAIDPGLGSLTYATEDGTIAKVQIAPSADTDRRAIRRIQRAMERSRRTTNPDNYEAVDVVRHGKKKKSFKVKSGRLQWRFSKRYEKLRSELAEMLRLCTATRKREHGEVCNWLLGHAGHIIVEDNSYKAFQRGRFGKTIGRHAPAALYAQLTNKAESAGLLVEVVSPKKLKPTQHNLLTGQFVKHELWERRVRLGEDDDERWIDRDAAACLNLLYADIENQIRPGTDP

SEQ ID NO: 3436 - protein, 1347 aa, unidentified
  REGION 1..1347: note = Category: MG91 effectors
  REGION 1..1347: note = Description: MG91-628 effector
  source 1..1347: note = uncultivated organism sequence
MEEKEYYLGLDMGTNSVGWAVTDPQYTILRAKGKDMWGIREFESAETAEKRRGHRTSRRRRQREVVRMGLVKDYFSDAINNVDGNFYARLENSKYHLEDKDEAVRNKNGIFADEHYTDKEYYAEYPTIYHLIMELINNPAPHDVRLVYLAVANLFKRRGHFLNAGLSEDGGNQSMQTAYDGFNTTCNETLGFSFPGINATQIEEVLKNRNYSKTVKSEKLAELLGVEKKEKQRIEILRAIAGRKVNAKVIFPNVETEDKVEFSFSDAAFDDNATELMTLLGDECYSLVLCMREMYDIGTLAEIMHGCQYLSESRMADYQKHHEDLVLLKSVIKSECTQKQYDELFRLDGEGSYSAYVNSTLAKNHKQRRSMKGRTRDDFYKKVRGLIGKSSNPDAIKICTEIENETFMPKMLTSANGIIPNQVHYKELKAILSNAEKYLSFLLEKDESGLTTSDRIQRLYKFRIPYYVGPVSNRDGKGNGWAVRKEEGTVLPWNLEEKIDLSKTKEAFIENLIRRCTYISDEKVLPKNSLIYEKFTVLNEINNIRINDERISVDLKQDIYNELFKKGKKVTRKTLAKYLINRGVIEAENQISGIDIAINNSLSSYGKFKAVFGESMDTDTTKKMVEDIIKTSTIYGDDKRELKNILRDKYGEILSEDQIKRIAGFRFKDWGRLSRAFLELAGADCRTGEVTSIIQALWESQLNLMELLHSEDYTFGESLNEKLVKNEKSLSEITAEDLDDYYFSAPVKRMAWQTILLIKEISKIKGCEPSKIFIEMTRTDEEKGDKGRKNSRAKELTALYKNIKKEGKAWIELIGKEDASGRLKSKKMYLYIKQMGRDMYTGEQIDLDRLFDDNLYDIDHIYPRHFVKDNNIENNLVLVNKAKNSRKSDNYPLDSDIVRNPKVRELWEMLHTNHLMSDEKYHRLTSRKAFTDEDMAGFIARQLVETGQATKGVADLLKDLTNSEIIYSKAGNVSDFRHAYDIPKSRIVNEFHHAHDAYLNIVVGNAYYTKFTSNPLNYIRNEYKKNTKENNYHLNKIFESTISRNGYVAWLAGSDKNPGTIQTVKKMLSRNTPLMTRMTFVIHGSIAKETLCGKNIAKEDSYLPLKGSDPRMSVEKYGGFNKASGAYFFLVEHELKGKKVRTIETVPVYLMKKLSDERELQKYCEEKLGLINPSIRLKQIKMQSLIKLNGYFVNVTGRTNKQLTLRNAVNLKLDKEDIYIIHLVEKCIGEERDDRLSEESILSLYQTLTEKQASGIYRNRPNSVYEKLNEGMIRFKNLERKQQIKVLANILNLTMVGKAQADLKDIGGSANSGVMLMAKKINNYNEVKLINQSVTGLYQTEVDLLTV

SEQ ID NO: 3437 - protein, 525 aa, unidentified
  REGION 1..525: note = Category: MG91 effectors
  REGION 1..525: note = Description: MG91-629 effector
  source 1..525: note = uncultivated organism sequence
MEEVFVLELPLQVEKYQEDILNKRYEQLRQLYNYVQGKLLRQYRYFEQMKEYQTCKTFKEKRDFFRSHPFHINGVYGNNKELLDITFDEYGINGFVGKMGKKLVNAGTTYADLGITSTLLDRLSLAIWAAWEKMLYDYHAKRISFKKYGELNIFGSRKKTNGSGKKMFSGMELHLETMTLSIKLNGKVGKNAKFITLPILHNPKHVDYEMMALKGGFDSVKVITVVRRMVRGRYKYYLQMSIEGEKPKKGRTLGKGNVGIDLGPTTIAVSSENIASIDKLASKCDNIEVEKKRLGRKIDRSRRANNPGNFNEDGTIKRGVRLTWNDSKRYKALRREMAELQRRQAAIRKQQHINRANALLKEGDTFIVENNQISGWTRKAKETKVNEKTGRIQKKKRFGKSVANHAPAMFVTILENKVKSLGGEVVKVDTQNAASQYDFTNNSFEKHELKERSVTLSNGDIHQRDMLAAFNLQHLKFDESEKKQYDREAMAQHYERFCELEQEEIMRYKSKEKKDDRSTIGAEKL

SEQ ID NO: 3438 - protein, 522 aa, unidentified
  REGION 1..522: note = Category: MG91 effectors
  REGION 1..522: note = Description: MG91-630 effector
  source 1..522: note = uncultivated organism sequence
MDKEVFVIEFPLNVEKWQADILNKRYEHLRTLYNYVQGKLLRQYIYFAKMGEYKNCKTPKERREFFKTHAFHIKGISGRNKFSLDITFTEYGIHSLVTKLAQHRIGADCTYGDKGINSMILDHMAAYIWSSWNKKLYDINARRISFKNFGEINTFGVRKINGARFCGLNLHLDIMTLDIKVNGKNGQQAKFISLPIRYNLKHADYEMNALAGGFDSIKVLTVVRRMVRGRYKYYLQMTIEAVKPQKGRHLGNGRVGIDIGPTTIAVSSNSTVSIDKLAAKCDNIEQDIQRIGRKIDRSRRAMNPDNFNADGTVKRGVRLTWVKSERYKALCQEKAELQRKQAAIRKAQHIERANTLISEGDTFIIESNPIKGWTARAKETKVSEKTGRIQKKKRWGKSVANHAPSMFVTILENKVKSLGGTVIKADVKNAASQYDFTDGTFNKHELDERGVTLSNGDTHQRDMLSAFNLQHLIYDAKELKQYDQQQMEIHYPRFCELEQQEIEKYKQRIKTDDRSTIAASRL

SEQ ID NO: 3439 - protein, 530 aa, unidentified
  REGION 1..530: note = Category: MG91 effectors
  REGION 1..530: note = Description: MG91-631 effector
  source 1..530: note = uncultivated organism sequence
MRTSSIIVSYELTLPQRIYPHLDRLFSVFGRSVRDFIDRFWNESTLELLSQKGHVCSIIKEIVQKPQNLPSRVFRNALELSGQILRSQIERKKLFDTFMQYPCLVLYDEKEIAKSLNTSIWFALNVKRQVLKLLRKGERGDYFSLVKPSFSNSVVITSADDSLERGQFKKLRIEKNKLLFELKVPIGNTWKWVKVTKFIPDRLRKALRNAKEIKAPLIKRVTLKSGFTIYRLVIPVEVELRVKNRVERVFALDLSPSEKRLGVGVVVDKEGHSKPVLFTAYKMVRKLERLYGEISGLERKIDNIADDLHSTFKKGHKERLNQRLRHLYQEQKLRWRKFKELRKQILETFINLVIAHAKAYSCDAIAIEDLKFKDLPDWENKRFRRLFSTWFYSRLEERLRHKAQREGIKVLSVNPFNTSQVCHECGSKGKANRFEFVCESCGKRFDRDYNASVNIGIKALTLACKTKSKPYMGEDIPARVSSLQVLTRYKFKALLTLLSFLKLLAYLRLVETSYLKLKSLLKCISADKYG

SEQ ID NO: 3440 - protein, 525 aa, unidentified
  REGION 1..525: note = Category: MG91 effectors
  REGION 1..525: note = Description: MG91-632 effector
  source 1..525: note = uncultivated organism sequence
MNEVFVLELPLQVEKYQADVLNKRYEQLRQLYNYVQGKLLRQYRYFEQMKEYQACKTIKEKRDFFRSHPFQINETLKGNKIPFMVSFDEYSIKGFVEKLAQKPVGANMTFADLGFTTYILDHLGASIWAAWDKMLYDFKAKRISFKKYGELDSFSSRRKLVGGKVYFSGMEVHLDTMELAIKINGKQSNNAKFITLKILHNPKHADYELWALKGGVNSVKVVKVVRRLVRSQYKYYVQLTIEGEKPQKGRRLGKGNVGIDLGPTTVAVSGVNVVSIDKLASKCDDIQEEITRLSRRIDRSRRANNPQNFNEDGTIKRGIKLVWNDSNRYKELRRELAELRRKQAAIRKQQHIERANALLKEGDTFIVENNPISSWTTRAKETKVNEKTGKIQKKKRFGKSVANHAPSMFVSILENKVKSLGGDLVKVDTKNAASQYDFTNNSFTKHELKERNVTLSNGDTHQRDMLAAFNLQHLQYDEKDDKQYDTEAMTADYERFCQLEQEEILRYKNKVKKDDRGTIGAEKLY

SEQ ID NO: 3441 - protein, 530 aa, unidentified
  REGION 1..530: note = Category: MG91 effectors
  REGION 1..530: note = Description: MG91-633 effector
  source 1..530: note = uncultivated organism sequence
MTSQSFVIELPIAVDDAEMRTIVRKLEFARQLHNATLGTAMGQLQQMRQDAAWKEACVMPKGKERAAAFRALDRKYGLTEYDLHSVIAGHREGSGRKAELGINETQKIATRVFQAINRFKLGLGGMPRFKSSKRGLHSIEGKTNKTGLKFRPEKKVLNWCGHDYRVLIDPKDDYIQRALKENERSDKYRKIKYCRLVRKRIRSSDRFFLQVVLEGTAPVKHVYAPVTERAAIDPGPQSIALFSKEFAGKIQVAGSNNFNEAVSRRLLRAMDRSLRRNNPDAYNENGTIKKGAKLVKSKNYQRKVDRLREMHRVAAAERKCRHGQTINLLLSIAGDIRIEKNSWKAFQRGHFGKSLGKSAMSGFIAQLKSKAASAGLKVTEVNPYKLKLSQYDPYTDTYRKKDLSERWQEMKAGSGLYIQRDVLSALLLYCADIEKEIHIPKVAVEQLEGAKQFLTDAGYVVLKSTSSRDQRDPRLASEPKAMTPEMARQKILRGAGDSHLPTDQELGRIRAGGKVSTWSKETFPLQRGVV

SEQ ID NO: 3442 - protein, 385 aa, unidentified
  REGION 1..385: note = Category: MG91 effectors
  REGION 1..385: note = Description: MG91-634 effector
  source 1..385: note = uncultivated organism sequence
MAHKENQKAFVVTFPLRTEKWQEDRIDKMMRMLTTFYNDRQRKLVRRYIYLSHSKAYKEAKGKGVVAFKNYMKENGFSQYGLNAFFKADTKGALYQCGLNSMFLQYLSQCAWSAWDKKLFGKGDFVKTDKVVNIFCSRNKKERFCGFDYDLSTFTISIKSTYAKKIICTIPFVVNKKSDYELFALSQRICRIGIVRKLIRGKYKYYVQFTFDGVPYNKVRNIGTGIVGIDPGPSKIAIVGDNKVEIAKLAPNIEEDERKTARLKRKLDRSRRATNPHMYKEDGTTIKGQRQTCFSKVYNETRKQLADAQRKLAAKRKIAHNELANTLLEYGDTFKVEANSYKSMQARAKATSMTKSGRIRSKKRYGKSIKNRAPSEFLVILNNSL

SEQ ID NO: 3443 - protein, 537 aa, unidentified
  REGION 1..537: note = Category: MG91 effectors
  REGION 1..537: note = Description: MG91-635 effector
  source 1..537: note = uncultivated organism sequence
MSTKSFIINLPIITGDQDRRRLRKSFSFGCNLQNAVMGGGWDRVLKMRATPEWQTARAMPKSSERTKAFRDLRVRFRLSEYDFHADVAKHRKASGRGHLLGINECQKLASRAWISVERHLYNGGSPRFISSRRGLHSIEGKTNRTGIIWKADQQCVTVCKHVYRVRVDKRDDWLTRALQDPTDPTRPRKVKYCRIVREMRKGKERFLLQLVAEGTSPLKHAYAGKDLRMAIDPGLGSLTYATEDGTIAKVQIAPSADTDHRAVRKLQRAMERSRQATNPDSYETVEVVRHGKKHKSLKVKSGRLQWRFSKRSESLRAELAEIFRLSAATRKREHGEVCNWLLGHAGHIIVEDNSYKAFQRGRFGKTIGRHAPAALYAQLTNKAESAGLLVEVVSPKKLKPTQHNLLTGQFVKHELWERRVRMGNDDDDRWIDRDAAACLNLLYADLEKQTYAPERIREAVLAGVTAWLDAGVVVIQAREGITEREFGRFRRRGIPSLTVQGLRQQGFRGRSDSKSGATPRRKASTVSKPSHFSGEVV

SEQ ID NO: 3444 - protein, 528 aa, unidentified
  REGION 1..528: note = Category: MG91 effectors
  REGION 1..528: note = Description: MG91-636 effector
  source 1..528: note = uncultivated organism sequence
MNEVFVLELPLQVEKYQADVLNKRYEQLRQLYNYVQGKLLKQYRYFEQMKEYQACKTIKEKRDFFKNHPFQINEKQKSSEIPFNVYFDEYSLKGYIEKLVQKSVGPNMTYADLGFTTNILDHLGASVWAAWDKKLYDLKAKRISFKKYGELDSFSSRRKVVRGVVYFSGMELHLDSMELAIKMNGKVGKDAKFITLKMLHNPKHADYELWALKGGVDSVKVVKVVRRLVRSQYKYYVQLTIEGEKPQKGRTLGKGNVGIDLGPTTVAVSGVNVVSIDKLASKCDNIQEEITQLSRKIDRSRRANNPQNFNEDGTIKRGIKLVWSDSKRYKELRRELAELRRKQAVIRKQQHIERANALLKEGDTFIVENNPISSWTTRAKETKVNEKTGKIQKKKRFGKSVANHAPSMFVSILENKVKSLGGRFERVSTQNAASQYDFTTDTFKTGEEKHKLNERAITLSNGDTHQRDMLAAFNLQHLKYDEKDAKQYDTEAMTADYERFCQLEQEEILRYKNKVKKDDRSTIGAEKL

SEQ ID NO: 3445 - protein, 537 aa, unidentified
  REGION 1..537: note = Category: MG91 effectors
  REGION 1..537: note = Description: MG91-637 effector
  source 1..537: note = uncultivated organism sequence
MSTKSFIISLPIITGDQDRRRLRKSFSFGCNLQNAVMGGGWDCVLKMRATPEWQAARAMPKGSERTKAFRDLRVHFRLSEYDFHADVAKHRKASGRGHLLGINEGQKLASRAWISVERHLYNGGSPRFISSRRGLHSIEGKTNRTGIIWKADQQCVTVCKHVYRVRVDKRDDWLTRALQDPTDPTKPRKVKYCRIVREMRKGKERFLLQLVAEGTSPLKHAYAGKDLRMAIDPGLGSLTYATEDGTIAKVQIAPSADTDHRAVRKLQRAMERSRRATNPDNYEAVDVVRHGKKKKSFKVKSGRLQWRFSKRYESLRAELAEIFRLSAATRKREHGEVCNWLLGHAGHIIVEDNSYKAFQRGRFGKTIGRHAPAALYAQLTNKAESAGLLVEVVSPKKLKPTQHNLLTGQFVKHELWERRVRLGEDDDERWIDRDAAACLNLLYADLEKQTYAPERIREAVLAGVTAWLDAGVVVIQAREGITEREFGRFRRRGIPSLTVQGLRQQGFRGRSDSKSGTTPRRKASTESKPSHFSGEVV

SEQ ID NO: 3446 - protein, 484 aa, unidentified
  REGION 1..484: note = Category: MG91 effectors
  REGION 1..484: note = Description: MG91-638 effector
  source 1..484: note = uncultivated organism sequence
MAHKENQKAFVVTFPLRTEKWQEDRIDKMMRMLTTFYNDRQRKLVRRYIYLSHSKAYKEAKDKGVVVFKNYMKEHGFSQYGLDAFFKADTKGALYQCGLNSMFLQYLSQCAWSAWDKKLFGKGDFVKTDKVVNIFCSRNKKESFCGFDYDLSTFTISIKSTCTKKIICTIPFVVNKKSDYELFALSQRICRIGIVRKLIRGKYKYYVQFTFDGVPYHKGRNIGTGIVGIDPGPSKIAIVGDNKVEIAKLAPNIEEDERKTARLKRKLDRSRRATNPHMYKEDGTIIKGQRQTCFSKAYNETRKQLADAQRKLAAKRKIAHNELANTLLEYGDTFKVEANSYKSMQARAKATSMTKSGRIRSKKRYGKSIKNRAPSEFLVILKNKLLYYPKGKYYDVPSSYACTQFDFTNESFTEHKISERRIVTSDGIQHNRDTLAAFNIKNAIVNDTSTKKKKVTKSKEFLDIVKMKASYNEFCVMERYLLSV

SEQ ID NO: 3447 - protein, 609 aa, unidentified
  REGION 1..609: note = Category: MG91 effectors
  REGION 1..609: note = Description: MG91-639 effector
  source 1..609: note = uncultivated organism sequence
MSKENFVLTLPLKVEKWQADILDKRYELLRQVYNMVQQKLLRQYIYFSQQKAYKECGKDTKKKGKFFAEHPFFIKIDGKPCEVKFPTWKKSNQTASNSIAKYVSKLSSYKLGQDKTLSDFGINSYILEELGARIMKAWEDRLYKFKAKHISKREYGDVNSFSTRIKKSDNKISYPGFTINLEEGYITYNTNGRRGGFANLIKLPIDFSREKKGYAVEALKGGLESIREISVVRKYIRGKNKYYLQLTIDGEKPQKGRTLGRGNVGIDIGPSTIATSSLMGVHFDKLADKCDDIEHELYLVNRKLDRSRRATNPQNYNADGTFKTIKNRERRVWNYSNRYNKLKLVRKELFRRQAEIRKQQHLAMANALLSQGDTFIVENNPIDAWVRRAKETTKNKKGNYRCKKRYGKSVAHHAPAMFVSILENKVKSLGGELHKVDVGYAATQFDFTNGEFTKHAVNERSITLSNGHTHQRDMLSAFNLQHARLKTEGRNIEKTVDNYDIEQMNADYPIFCRLETAEQERFKAIRHYERDALFFVGVSNKHLRCQPQEETVANRHNGGVGRKDCNISLGSENAEITGNGLIRESIARVSQVPDECHPFAGKPIVLDGL

SEQ ID NO: 3448 - protein, 497 aa, unidentified
  REGION 1..497: note = Category: MG91 effectors
  REGION 1..497: note = Description: MG91-640 effector
  source 1..497: note = uncultivated organism sequence
MPSPTFIIELPIRVNDSESRTILRKLEFARQLHNATLGTALGQLQQLRQDSEWKRACLMPKGKERSELFRKLDRKYRLTEYDLHAVIAKHRQASGRKAELGINETQKIATRVFHAVNRYKLGLGGRPRFKSLSRGLRSIEGKSNKTGLKFNIEKSVLSWCKHDYRVFIDPQDDYLQRALRSEDRGGFKKVKYCRLVRKTIKGKNRFYLQVVLEGQAPIKHIYASTNERLSIDPGPQTIAVFSDVWAGKIKVSPNAQVDEKKIRRLQRSMDRSLRKSNPDCYENDGTLKKGCVLKKTKGCEKRIQRLQECHRKAVATRRCEHGQLINLLLSVAGDIRVEKNQWKAFQKGHFGKSLGKSGISGFIERLKSKAESAGLKVTEVKPYKLKLSQYDPYTDQYRKKSLNERWHSLGESSEWIQRDVMSALLLQCADLEEEKHIPTEVIKTLEGAKQLLRDAGYVILKPSSNGESNPAFASEPKAVTPEKVRLEIFCGASDSYL

SEQ ID NO: 3449 - protein, 491 aa, unidentified
  REGION 1..491: note = Category: MG91 effectors
  REGION 1..491: note = Description: MG91-641 effector
  source 1..491: note = uncultivated organism sequence
MRATPEWQAARAMPKGSERTKAFRDLRMRFRLSEYDFHADVAKHRKASGRGHLLGINECQKLASRAWISVERHLYNGGSPRFISSRRGLHSIEGKTNRTGIIWKADQQCVTVCKHVYRVRVDKRDDWLTRALQDPTDPKKPRKVKYCRIVREMRKGKERFLLQLVAEGTSPLKHAYAGKDLRMAIDPGLGSLTYATEDGTIAKVQIAPSADTDHRAIRRIQRAMERSRRATNPDNYETVEVVRHGKKHKSLKVKSGRLQWRFSKRYESLRAELAEIFRLSAATRKREHGEVCNWLLGHAGHIIVEDNSYKAFQRGRFGKTIGRHAPAALYAQLTNKAESAGLLVEVVSPKKLKPTQHNLLTGQFVKHELWERRVRLGEDDDERWIDRDAAACLNLLYADIENQTYAPERIREAVLAGVTAWLDAGVVVIQAREGITEREFGRFRRRGIPSLTVQGLRQQGFRGRSDSKSGATPRRKASTVSKPSHFSGEVV

SEQ ID NO: 3450 - protein, 588 aa, unidentified
  REGION 1..588: note = Category: MG91 effectors
  REGION 1..588: note = Description: MG91-642 effector
  source 1..588: note = uncultivated organism sequence
MVQRKLVRQYIYFAQQKEYKACENFQQRRDFFASHPFHFKGINSKNGEPADIKFPYTYESRSSNSGKRPSGGISDYVSKLWAHRVGADKTLANLGINSYILEELGLHIMKAWEKRLYDPRSSRVSFKDYGEVNSFGSRYKKDKQTGKVSFPGFTIYLEKDKNEVVKGGFITYNTNGKRSQPRPFVLPIDFSREKKDYAAYALKGGIDSLRKLIILRKNIRGRNKYYLQLTISGEKPQKGRTLGQGNVGIDIGPSTIATSSLQGVHFDKLADKCDNIEHELYLINRKMARSRYENNRQNYNADKTIKRGVRLVWKKDKDVKRYASLKLKRRELYRRQAEIRKLQHLEMANAMLSQGDTFIVENNPIDAWVRRAKETTKTKTGRNRCKKRYGKSVANHAPAMFVTILKNKVESLGGKFYEVDVRYAATQFDFTNGVKTKHEVSERSITLSNGRTHQRDMISAFNLQHIKLESIGTEVKEYDIEQMQADYPIFCRLEAAEQERFKMARHNERDALYFVGASEKQLRHQPQDESAANRHNGGVGRKHCNIRLGNENAEITGSGLVRESIERVSQVPDECHISGHQPIVLDGL

SEQ ID NO: 3451 - protein, 544 aa, unidentified
  REGION 1..544: note = Category: MG91 effectors
  REGION 1..544: note = Description: MG91-643 effector
  source 1..544: note = uncultivated organism sequence
MRVCCHHVVLITQKCRLLNKMNEVFVLELPLHVEKYQADILDKRYEQLRQLYNYVQGKLLRQYRYFEQMKEYQGCKTFKEKKDFFRSHPFKINETLKDSKTPFMVSFDEYSIKGFVEKLAQKSVGPNMAYSDLGFTTYILDHIGASIWAAWDKKLYDFKSNRISFKKHGELDSFSSRRKIVRGIVYFSGMELHLDTMELAIKINGKVGKEARFITLKMLHNPKHADYEMWALKGGVESVKVVKVVRRLVRSQYKYYVQLTIEGEKPQKGRTLGKGNVGIDLGPTTVTISGKNIVSIDKLASKCDNIQEEITRLSRKIDRTRRANNPQNFNEDGTVKRGIKLVWNDSKRYKELRRELTELRRKQAAIRKQQHIERANALLKEGDTFIVENNPVKAWSARKKETKIDEKTGKYKSKKGYGKSIGNHAPAMFIDILENKVKSLGGRLERVDTQNAASRFDFTDGSLTEHDRSERAITLSNGDTHQRDMLAAFNLQHLKLDEAKTKQYDTETMAADYKRFCQLEKEEIQRYKNKEKKDDRGTIGAGKL

SEQ ID NO: 3452 - protein, 525 aa, unidentified
  REGION 1..525: note = Category: MG91 effectors
  REGION 1..525: note = Description: MG91-644 effector
  source 1..525: note = uncultivated organism sequence
MNEVFVLELPLQVEKYQADLLNKRYEQLRQLYNYVQGKLLRQYRYFEQMKEYQACKTIKVKRDFFKNHPFQINETQKGSEIPFKVSFDEYSIKGYIEKLVQKPVGPNMTYADLGFTTNILDHLGASIWAAWDKKLYDFKAKRISFKKYGELDSFSSRRKVVRGVVYFSGMELHLDTMELAIKMNGKVGKEAKFITLKILHNPKHAEYEMWALKGGVDSVKVVKVVRRLVRSQYKYYVQLTIEGEKPQKGRTLGKGNVGIDLGPTTVAVSGMNIVSIDKLASKCDNIQPKITRLSRKLDRSRRANNPDNYNEDGTIKRGVKLVWKKEKDLKRYSKLKRELAELRRKQAAIRKQQHIDRANELLKEGDTFIVENNQISGWTTRAKETKVNEKTGKIQKKKRFGKSVANHAPSMFVSILENKVKSLGGEVMKVDTKNAASQYDFTDNSFTKHELKERNVTLSNGDTHQRDMLAAFNLQHLKLEGTKQYDTEAMAADYVRFCQLEQEEIQRYKNKEKKNDRGTIGAEKL

SEQ ID NO: 3453 - protein, 530 aa, unidentified
  REGION 1..530: note = Category: MG91 effectors
  REGION 1..530: note = Description: MG91-645 effector
  source 1..530: note = uncultivated organism sequence
MTSQSFVIELPIAVDDAEMRTIVRKLEFARQLHNATLGTAMGQLQQMRQDAAWKEACVMPKGKERAAAFRALDCKYGLTEYDLHSVIARHREGSGRKAELGINETQKIATRVFQAINRYKLGLGGMPRFKSSKRGLHSIEGKTNKTGLKFRPEKKVLNWCGHDYRVLIDPKDDYIQRALKENERSDKYRKIKYCRLVRKRIRSSDRFFLQVVLEGTAPVKHVYAPVTERAAIDPGPQSIALFSKEFAGKIQVAGSNNFNEAVSRRLLRAMDRSLRRNNPDAYNEDGTIKKGAKLVKSKNYQRKVDRLREMHRVAAAERKCRHGQTINLLLSIAGDIRIEKNSWKAFQRGHFGKSLGKSAMSGFIAQLKSKAASAGLKVTEVNPYKLRLSQYDPYTDTYRKKDLSERWQEMKAGSGLYIQRDILSALLLYCADIEKEIHIPKVAVEQLEGTKQFLTDAGYVVLKSTSSRDQRDPRLASEPKAMTPEMARQKILRGAGDSHLPTDQELGQIRAGGKVSTWSKETFPLQRGVV

SEQ ID NO: 3454 - protein, 539 aa, unidentified
  REGION 1..539: note = Category: MG91 effectors
  REGION 1..539: note = Description: MG91-646 effector
  source 1..539: note = uncultivated organism sequence
MNEVFVLELPLQVEKYQADILNKRYEQLRQLYNYVQGKLLRQYRYFEQMREFQTCKTFKEKKDFFRRHPFHIDGILGSNKELFDITFDEYGINGFVGKLGKKQVSAGVTYADLGITSTLLDRMSLAVWAAWDKMLYDYHARRVSFKKHGELNIFGSRKKTNGSGKKVFSGMELHLEKMEVAIKLNGKVGKAAKFITLPILHNPKHEDYEMWALKGGFDSVTVLTIVRRLVRGQYKYYVQLTIEGEKPQKGRTLGKGNVGIDLGPTTVAVSGENVVSIDKLASKCDNSQEEITRLSRKIDRSRRANNPQNFNEDGTIKRGVKLVWNDSKRYKELRRELAELRRKQAAIRKQQHIDRANALLKEGDTFIVENNPVKAWSAKKKETKIDEKTGRYKSKKGYGKSVGNHAPAMFVDILENKVKSLGGRFERVNTQNAASQYDFTTDSFKTGDEKHKLNERAITLSNGDTHQRDMLAAFNLQHLKLDEAKTKQYNTEAMKADYERFCEMEQEEIMRYKNLEKKDDRATIGAVDLWKESDEMKKE

SEQ ID NO: 3455 - protein, 530 aa, unidentified
  REGION 1..530: note = Category: MG91 effectors
  REGION 1..530: note = Description: MG91-647 effector
  source 1..530: note = uncultivated organism sequence
MNEVFVLELPLQVEKFQTDILNKRYEQLRQLYNYVQGKLLRQYRYFEQMKEYQACEKFREKKDFFKSHPFHINETLKGNKTPIKVSFDEYSIKGYIEKLAQKPVGPNMTYADIGFTTYILDHLGASIWSAWDKKLYDFKAKRISFKKYGELDSFSSRRKVVRGIVYFSGMELHLDTMELAIKLNGKVGKEAKFITLKILHNPKHADYEMWALKGGLESIKVVKVVRRMVRSQYKYYVQLTIEGEKPQKGRTLGKGRVGIDLGPTTVAISSENVVSIDKLASKCDNIQDEITKLSRKIDRSRRANNPQNFNEDGTIKRGIKLVWNDSKRYKELRRELAELRRKQAAIRKLQHIERANALLKEGDTFIVENNPVNAWVRRAKETKIDEKTGKYKSKRGSGRSVGNHAPAMFVDILENKVKSLGGRFERVTTQNAASQYDFTTDSFKTGDEKHKLNERAITLSNGDTHQRDMLAAFNLQHLKLDEAKTKQYDTEAMAADYERFCQLEQEEIMRYKNKEKKGDRGTIGAEYIHK

SEQ ID NO: 3456 - protein, 544 aa, unidentified
  REGION 1..544: note = Category: MG91 effectors
  REGION 1..544: note = Description: MG91-649 effector
  source 1..544: note = uncultivated organism sequence
MNLDSRVMNVSPRIVIRQSKVKEVFVLELPLRVEKYQADLLNKRFEQLRQLYNYVQGKLLRQYRYFEQMKEYQACKTFKEKKDFFRKHPFHINGILGSNKKPLNITFDEYGIRGFVEKLVQKGVGASMTYADLGFTTSILDHLSSGIWSAWDKMLYDYKARRISFRKYGELDSFSSRRKVVQGKIYFSGMELHLDSMMLSVKMNGKVGKAAKFITLPILHNPKHADYEMWALKGGLDSIKVVKVVRRMVRGRYKYYLQMSIESEKPLKGRKLGKGNVGIDLGPTTVAVSGENIASIDKLASKCDSIETEKAKLGRKIDRSRRANNPQNFNEDGTIKRGVRLVWNDSKRYKALRGEMAELQRRQSAIRKQQHIDRANELLKEGDIFIVENNQISGWTRKAKETRVDESTGRIRKKKRFGKSVANHAPSMFVNILENKVKSLGGQLVKVDTQNAASQYDFTDGSFTKHELQERNVTLSNGDTHQRDMLAAFNLQHLKYDEAEKKQYDREAMSKHYERFCELEQAEILRYKNKEKVDDRSTIGAKEL

SEQ ID NO: 3457 - protein, 507 aa, unidentified
  REGION 1..507: note = Category: MG91 effectors
  REGION 1..507: note = Description: MG91-650 effector
  source 1..507: note = uncultivated organism sequence
MKEQILSYELTLPQRIYPHLERLFSVFKNQVNSYIPKLWNEEGFKLLSQKSHAWGILKKEFPTPIGLPSRVFRNVLELTGQIIRSQIERKEVFEKLLRREELKGYDKRFVLNVQRQIENLRKKGKEVSCYFDLPYPEFDGNVVITSADDNFEKGQFRRLKISGNFLEFSIKVPTQKGWEWIKVKKLIPERLRKALMKAKEVKAVLIKKVLLKSGYNIYRLVIPLSFEVKEPEKVERVLALDLSPSEKRLGVAVLVEGEEVSKPLFFKTLMLRKVERLYFEVSNLERKIDNIYNSIEKTACKREKKRLWERLRHLFAEQKLKQRKIKQLRKQILETFTNLIVSHAKAYHCQAIVIEDLSFKEVPGWKNKPALRRFSQWFFSRFTSRLEEKAKFHNLKVMKVNPAYTSRVCHKCGKEGELEGLVFKCSCGTYDRDYNASVNIAFRLTKPKAQRAEGIPGRIPSRLVRVEWKALLSFISFSKLLAWLRIVETSQLKLKKLLKWIGSDKYD

SEQ ID NO: 3458 - protein, 531 aa, unidentified
  REGION 1..531: note = Category: MG91 effectors
  REGION 1..531: note = Description: MG91-651 effector
  source 1..531: note = uncultivated organism sequence
MNEVFVLELPLQVEKYQADILNKRYEQLRQLYNYVQGKLLRQYRYFEQMKEFQDCKTFKAKREFIKAHPFQIKGVMGRNKELLDIFFDEYGILGLITKLGQKPIGSGKTYTDMGISSTILANLSNSIWSSWNKKLYDYHADRISFKKYGGLNTFGSGKIIQKKDNEVKEYFPGMVLHLDRMEIDIKTNGGLGKKATFITLPILHNPKHADYEMNALSGGSSSIKVLTIVRRMIRGQYKYYLQMSIEGEKPQKGRLLGKGNVGIDLGPTTVAVSGENIVSIDKLASKCDDIQEVITRLSRKIDRSRRANNPQNFNEDGTIKRGIKLVWNDSKRYKELRRELAELRRKQAAIRKQQHIDRANALLKEGDTFIVENNQISSWTTRAKETKVNEKTGKIQKKKRFGKSVANHAPSMFVSILENKVKSLGGKVVKVDTKNAASQYDFTDGSFTKHELKERNVTLSNGDTHQRDMLAAFNLQHLKYNEAEAKQYDTEAMAADYERFCQLEQEEILRYKNKEKKDDRSTIGAEELLKT

SEQ ID NO: 3459 - protein, 525 aa, unidentified
  REGION 1..525: note = Category: MG91 effectors
  REGION 1..525: note = Description: MG91-652 effector
  source 1..525: note = uncultivated organism sequence
MTSQSFVIELPIAVDDAEMRTIVRKLEFARQLHNATLGTAMGQLQQMRQDAAWKEACVMPKGKERAAAFRALDRKYGLTEYDLHSVIARHREGSGRKAELGINETQKIATRVFQAINRYKLGLGGMPRFKSSKRGLHSIEGKTNKTGLKFRPEKKVLNWCGHDYRVLIDPKDDYVQRALKENERSDQYRKIKYCRLVRKRIRSADRFFLQVVLEGTAPVKHVYAPVTERAAIDPGPQSIALFSKAFAGKIQVAGSNNFNEAASRRLLRAMDRSLRRNNPDAYNEDGTIKKGAKLVKSKNYQRKVDRLREMHRVVAAERKCRHGQTINLLLSIAGDIRIEKNSWKAFQRGHFGKSLGKSAMSGFIAQLKSKAASAGLKVTEVNPYKLKLSQYDPYTDTYRKKDLSERWQEMKAGSGQYIQRDILSALLLYCADIEKEIHIPKAAVEQLEGAKQFLTDAGYVVLKSTSSRDQRDLRLAPEPKAMTPEMARQKILRGAGDSHLPTDQALGRIRAGGKVSTWSKETFPL

SEQ ID NO: 3460 - protein, 510 aa, unidentified
  REGION 1..510: note = Category: MG91 effectors
  REGION 1..510: note = Description: MG91-653 effector
  source 1..510: note = uncultivated organism sequence
MKEQILSYELTLPQRIYPHLDRLFSVFRSQVNSYIQELWNEKGFELLSQKGSAVGILKEVFPTPECVPSRVFRNILELTGQIIRGQIERKEVFEKLLKEEKVKGYSKNLVLNVQRQIENLRRKGKEVSCYFDLPHPEFDGRIVITSADDNLEKGQFRRVKVDRNFLTFEIKVPMQDGWEWIKVRKFLPGRLRKALLRAKEIQVPLIKRQRLKSGYTIYRLVIPLVFKVKEPEKVERVFAIDLSPGERRLGVGIVMDDEFVSKPIFFKTNLIKKVERIHKEISNLERKIDNIHNAIEDANSKRVKETLFKRLNHLFGEQKRKQRKIKELRKQILETFTNLAIAYAKAYHCQAVAIEKLVFKEVPSWQSSKALRLFTQWFYSKFAKRLEEKARVNELKVIKVNPAYTSKACAKCGREGEFEGLKFICFCGVYDRDYNASLSIAKRALRPTKPEAQGAEGIPGRIPSRLVRMEGSALLTMISLFKLLAWLKVVHTCCLKPQKLFKWIRSDKYG

SEQ ID NO: 3461 - protein, 537 aa, unidentified
  REGION 1..537: note = Category: MG91 effectors
  REGION 1..537: note = Description: MG91-654 effector
  source 1..537: note = uncultivated organism sequence
MSTKSFTINLPIITGDQDRRRLRKSFSFGCNLQNAVMGGGWDRVLKMRATAEWQTARAMPKSSERTKAFRDLRVRFRLSEYDFHADVAKHRKASGRGHLLGINECQKLASRAWISVERHLYNGGSPRFISSRRGLHSIEGKTNRTGIIWKADQQCVTVCKHVYRVRVDKSDDWLTRALQDPTDPTKPRKVKYCRIVREMRKGKERFLLQLVAEGTSPLKHAYAGKDLRMAIDPGLGSLTYATEDGTIAKVQIAPSADTDHRAIRRIQRAMERSRRATNPDNYEAVDVVRHGKKHKSLKVKSGRLQWRFSKRYESLRAELAEIFRLSAATRKREHGEVCNWLLGHAGHIIVEDNSYKAFQRGRFGKTIGRHAPVALYAQLASKAESAGLLVEVVSPKKVKPTQHNLLTDTFVKHELWERRVRLGNDDDDRWIDRDAAACLNLLYADLEKQTYAPERIREAVLAGVTAWLDAGVVVIQAREGITEREFGRFRRRGIPSLTVQGLRQQGFRGRSDSKSGTTPRRKASTVSKPSNFRGEVV

SEQ ID NO: 3462 - protein, 511 aa, unidentified
  REGION 1..511: note = Category: MG91 effectors
  REGION 1..511: note = Description: MG91-655 effector
  source 1..511: note = uncultivated organism sequence
MGGMRAIRIAVMTSQSFIVELPIVVDDSERRTIVQKLEYARQLHNATLGTALGQLQQMRQDTAWRQARSMPQGKERTEIFRALDRQYKLTEYDLHAVIARHREESGRKAELGINETQKIATRVYQSVNRYKLGLGGCPRFKSFKRGLHSIEGKTNKTGLKFKPEQSVLSWCGHDYRVLIDPKDDYLQRALKADGQGTGYRKIKYCRLVRRRIRSKEYFYLQVVLEGTAPVKHIYASTNERLAIDPGPQTIAVFSNMFIGKIRVAGNYQLQDAQIRRLQRSMDRSLRANNKDANEENGTLKKGAKLVQTKGYLTRAARLRELHRKAAMHRKCQHGQTVNLLLSIAGDIRIEKNNWKAFQRGHFGKSLGKSAMSGFFNQLRTKAESAGLKVTEVNPYKLKLSQYDPYTETYRKKDLKERWQEMQPGSGQYIQRDVLSALLLLCADLEEEKHIPKAALDRLEGAKQLLKGAGYVIDKPTSNPDQPDPRFAPEPKALTPERARLEILCGTGDSCL

SEQ ID NO: 3463 - protein, 525 aa, unidentified
  REGION 1..525: note = Category: MG91 effectors
  REGION 1..525: note = Description: MG91-656 effector
  source 1..525: note = uncultivated organism sequence
MEEVFVLELPLQVEKYQEDILNKRYEQLRQLYNYIQGKLLRQYRYFEQMKEFQVCKTFKEKRDFFRNHPFHINGVYGNNKELLDITFDEYGINGFVGKMGKKLVNADTTYADLGITSTLLDRLSLAIWAAWEKMLYDYHAKRISFKKYGELNIFGSRKKTNGSGKKMFSGMELHLETMTLAVKLNGKVGKKAKFITLPILHNPKHVDYEMMALKGGFDSVKVITVVRRMVRERYKYYLQMSIEGEKPQKGRTLGKGNVGIDLGPTTVAVSGENIVSIDKLASKCDNIQAEITRLARKIDRSRRANNPQNFNEDGTIKRGVRLTWNDSKRYKALRREMAELQRRQAAIRKQQHINRANALLKEGDTFIVENNQISGWTRKAKETKVNEKTGKIQKKKRFGKSVANHAPAMFVTILENKVKSLGGEVVKVDTQNAASQYDFTNNNFKKHELNERSVTLSNGDTHQRDMLAAFNLQHLKYDEAEKKQYDREAMSKHYERFCELEQAEIVRYKNKEKADDRSTIGAKEL

SEQ ID NO: 3464 - protein, 612 aa, unidentified
  REGION 1..612: note = Category: MG91 effectors
  REGION 1..612: note = Description: MG91-657 effector
  source 1..612: note = uncultivated organism sequence
MAKETFVLTLPLKVEKWQADILDKRYELLRQTYNMVHRKLLCQYIYFSQQKAYKACENFQQRREFFESHPFHFKGINGKNGEPSDIKFPYTYESRSSNSGKRPSGGISDYVSKLWSHRVGQDKTLADFGLNGSILEELGLHVMSAWGKRLYDPKASRVSFKEYGDINSFGCRYHKGNFAGFTINLEEGYITYNTNCRRGRFADIIQLPIDFSREKKDYAVYALRGGIDSLRKLIILRKNIRGRNKYYLQLTINGEKPQKGRTLGRGNVGIDIGPSTIATSSLQGVHFDKLADKCDNIEHELYLIGRKMDRSRRANNPQNYNPDGTIKRGVRLTWKKDSEAKRYASLKQKRRELYRRQAEIRKLQHLEMANAMLSQGDTFIVENNPIDAWVRRAKETTKTKTGRNRCKKRYGKSVANHAPAMFVSILKNKVLSLGGAFHEVDVRYAATQFDFTNGVKTKHEVGERRITLSNGRTHQRDMISAFNLQHIKLESIGTEVKEYDIEQMQADYPIFCQLEAAEQERFKEARHAERDALYFIGAQEKQLRHQPQDESVANRHNGGVGRKHCNTRLGSRSKENAKITGSGLVRESIARVSQVPDECHPVGDHPIILDGL

SEQ ID NO: 3465 - protein, 607 aa, unidentified
  REGION 1..607: note = Category: MG91 effectors
  REGION 1..607: note = Description: MG91-658 effector
  source 1..607: note = uncultivated organism sequence
MAKEEFVLTLPLKVEKWQADILDKRYEMLRQVYNMVQQKLVRQYIYFSQQKAYRDCKNFEQRREFFENHPFHIKGVKGKNGELCDIKFPYTFKSRGGPSGKRAPNGISDYVSKLWSHKIGQNKTLSDYGINSYIMEELGLHIMKAWEDRLYKPKSKRVSFKDYGEINSFGSRKKNGIFVGFTINLDNGIITYKTNGRLGQFADLIQLPIDFCREKSGYAKEALKGGIESLKKLLIVRRYIRGGNKYYLQLTISGEKPQKGRTLGKGNVGIDIGPSTIATSSLKGVHFDKLANKCDNIEHELYLINRKLDRSRRANNPQNYNEDGTIKRGIRLVWKKDKDVKRYATLKQQRKELYRKQAEIRKHQHLEMANAMLSQGDTFIVENNPVDAWVRRAKETTKTKAGKNRCKKRYGRSVANHAPAMFVSILKNKVLSLGGNFYEIDPRNAATQFDFTNGKFTKHEVRERSITLSNGCTHQRDMLSAFNLQHIVLQSKELKEYDIEQMKADYPIFCRLESAEQERFRIARHNERDALYFVGASEKQMRRQPQEKTVANHHNGGVDRKYCNTSLESENVKITGSGLVRESIERVSQVPDECHLFGCDPIVLDGL

SEQ ID NO: 3466 - protein, 524 aa, unidentified
  REGION 1..524: note = Category: MG91 effectors
  REGION 1..524: note = Description: MG91-659 effector
  source 1..524: note = uncultivated organism sequence
MKEVFVLDLPLRVEKYQSDILNKRFEQLRQLYNYVQGKLLRQYRYFEQMKEYQACKTFKEKKDFFRNHPFHINGILGSNKELLDITFDEYGIKGFVEKLVQKGVGTDMTYADLGFTTYILDHLSAGIWSAWDKMLYDYKARRISFKKYGELDSFSSRRKVVQGKVYFSGMELHLDSMMLSVKMNGKVGKAAKFITLPILHNPKHADYEMWALKGGLDSIKVVKVVRRMVRGRYKYYLQMSIESEKPLKGRKLGKGNVGIDLGPTTVAVSGENIASIDKLASKCDSIETEKAKLGRKIDRSRRANNPQNFNEDGTIKRGVRLVWNDSKRYKALRGEMAELQRRQSAIRKQQHIDRANELLKEGDIFIVENNQISGWTRKAKETRVDESTGRIRKKKRFGKSVANHAPSMFVNILENKVKSLGGQLVKVDTQNAASQYDFTDGSFTKHELQERNVTLSNGDTHQRDMLAAFNLQHLKYDEAEKKQYDREAMSKHYERFCELEQAEILRYKNKEKVDDRSTIGAKEL

SEQ ID NO: 3467 - protein, 529 aa, unidentified
  REGION 1..529: note = Category: MG91 effectors
  REGION 1..529: note = Description: MG91-660 effector
  source 1..529: note = uncultivated organism sequence
MKEVFVLELPLQVEKYQADILNKRYEQLRQLYNYVQGKLLRQYRYFEQMKDYQACKAFKEKREFFKTHPFHINGVLGRNKELLDITFNEYGILGWVTKLGQMSIGSGKTYADIGITARILANLSDNIWSAWNKKLYDYRSERISFKKYGSLNTFGSGKTILKKGKEIKEYFSGMVLHLERMEIDIKTNGSNGKNATFISLPILHNPKHADYEMMALSGGSSSIKVLTIVRRLVRGQYKYYLQLSIEGEKPQKGRTLGKGNVGIDLGPTTIAVSGENVVSIDKLASKCDNIQTEITKLARKIDRSRRANNPQNFNEDGTIKRGIKLVWNDSKRYKELRRELAELCRKQAAIRKQQHIDRANALLKEGDTFIVENNPVKAWAARAKETKVNEKTGKIQSKKRGGKSIGNHAPAMFVDILENKVKSLGGTFIRANTNNAASQYDFSNNSFKEGEDRHGLNERAITLSNGNTHQRDMLAAFNLQHLTDEKKQYDVEAMKRDYERFCQLEQEEIQRYKNKEKKDDRGTIGAEKL

SEQ ID NO: 3468 - protein, 472 aa, unidentified
  REGION 1..472: note = Category: MG91 effectors
  REGION 1..472: note = Description: MG91-662 effector
  source 1..472: note = uncultivated organism sequence
MPKGKERAAAFRALDRKYGLTEYDLHSVIARHREGTGRKAELGINETQKIATRVFQAINRYKLGLGGMPRFKSFKRGLHSIEGKTNKTGLKFKPEQKVLNWCGHDYRVLIDPKDDYIQRALKDNERSDQYRKIKYCRLVRRRIRSADRFFLQVVLEGTAPVKHVYAPVTERAAIDPGPQSIALFSKAFAGKIQVAGSNNFNEAASRRLLRAMDRSLRRNNPDAYNEDGTINKGVKLAKSKNYQRKVDRLHEMHRVAAAQRKCRHGQTINLLLSIAGDIRIEKNSWKAFQRGHFGKSLGKSAMSGFIAQLKSKAESAGLKVTEVNPYKLKLSQYDPYTDTYRKKDLSERWQEMKAGSGQYIQRDVLSALLLYCADIEKEIHIPKAAVEQLEGAKQLLTDAGYVVLKSTSSRDQRDPRLASEPKAMTPEMARQKILRGAGDSHLPTDQALGRIRAGEKVSTWSKETFPLQRGVV

SEQ ID NO: 3469 - protein, 525 aa, unidentified
  REGION 1..525: note = Category: MG91 effectors
  REGION 1..525: note = Description: MG91-663 effector
  source 1..525: note = uncultivated organism sequence
MTSQSFVIELPIALDDAEMRTIVRKLEFARQLHNATLGTAMGQLQQMRQDAAWKEACVMPKGKERAAAFRALDRKYGLTEYDLHSVIARHREGTGRKAELGINETQKIATRVFQAINRYKLGLGGMPRFKSSKRGLHSIEGKTNKTGLKFRPEKKVLNWCGHDYRVLIDPKDDYVQRALKENERSDQYRKIKYCRLVRKRIRSADRFFLQVVLEGTAPVKHVYAPVTERAAIDPGPQSIALFSKAFAGKIQVAGSNNFNEAASRRLLRAMDRSLRRSNPDAYNEDGTIKKGAKLVKSKNYQRKVDRLREMHRVAAAERKCRHGQTINLLLSIAGDIRIEKNSWKAFQRGHFGKSLGKSAMSGFIAQLKSKAASAGLKVKEVNHYKLKLSQYDPYTDTYRKKDLSERWQEMKAGSGQYIQRDILSALLLYCADIEKEIHIPKVAVEQLEGAKQFLTDAGYVVLKSTSSRDQRDLRLAPEPKAMTPEMARQKILRGAGDSHLPTDQALGRIRAGGKVSTWSKETFPL

SEQ ID NO: 3470 - protein, 1128 aa, unidentified
  REGION 1..1128: note = Category: MG91 effectors
  REGION 1..1128: note = Description: MG91-664 effector
  source 1..1128: note = uncultivated organism sequence
MNKKILSLDLGITSIGYSVIEEFDNDRYSLLDYGVSMFDKATDKDGNSKKILHSQSESSSKLFNLRKQRKKDLSILFDNFKLANKDKLLIQEKQNIYKNKWQLRCVKAFEQKLSINELFTIFYTIAKHRGYKSLESSDLLDELCEELNIPLEITKSNKNEDEKGKIKKSLKNVEELKQNSNKTVASIIYDIEIQKNNPTFRNHDNYNYMIRREYIEEEIINIVKSQVKFGLFESSFNSDIFIQKLKDIITYQNPSTNDMSLFGDCEFYPQFKVANQYSIISDIYKMYQSVSNITFNSKPTIKITKEQINLVANDFFTKLKKGKNILDLKYKDIRKILNLSDDIKIFNKDDDYISKGKKVHHTITKFHFINNLSKFDTNFIINNLSNENGYKNLKEIFEALQFEKDPTEIYKKLKDKIEDNQTIIYLIKYKSGNSLNISAEAMIKFIPYFKDGYTTDEIKEKLKLNRSEDYSEFKKGIKYLHINQFEKDNNNLKITNHPVKYVVSATLRVVKHLHNVYGSFDEIRVESTRELSQNEETKKAIEKANRELEKQIDTIVQNNEYQIIAKQYGKNLQKYARKILMYESQDRRDIYTGKGIEFKDIFTNTVDLDHIVPQSLGGLSVKHNFVLVHKDTNIQKSNQLPLNFVKDKEDFINRVEYLFAEHKINWKMKKNLLSNSLEETYKDTFESKSLRATSYIEALTAQVLKRYYPFKDIKKQKDGSSVRHIQGRATSNIRKILKVKTKIRDTNIHHAIDAILIGMTNQSWLKKLSDTFKNNMGVIDDKARANIKKDIPIFEIIINNEVKYLEPKELVNLIEDNYNFDGENSIFYKDIWGKTKSINFWVSKKPMVSKIHKDTIYSKKDNGIYTVRESIINHFINLKITPTTLSKKFEEEFNKKILNKMYLYKTNPNDIIYKIVQQRANDIKVLLDSFMLEDTKDKETLSILKTNLDNLIHSDLLDNNNNIIKKVKFYQTNLTGFNVRGGLATKEKTFIGFKATLENDKLNYTRIDVANIDKIKKDNDNSFKVYKNDLVFFVYPDKSYKGGKIVSFLEDKKIGAFQNPRFPATIQFQPFNFCKLGSGKKVGTKQQALAQTIGIIKLNLDILGNIKSYQKIGQCNSDILEHIKTIKG

SEQ ID NO: 3471 - RNA, 43 nt, synthetic construct
  misc_feature 1..43: note = Category: MG11 effectors crRNA
  misc_feature 1..43: note = Description: MG11-1 effector crRNA
  source 1..43: mol_type = other RNA
  variation 20..43: note = any nucleotide
gaatacctgctaatgcaggnnnnnnnnnnnnnnnnnnnnnnnn

SEQ ID NO: 3472 - DNA, 31 bp, unidentified
  misc_feature 1..31: note = Category: MG11 effectors repeat
  misc_feature 1..31: note = Description: MG11-1 effector repeat
  source 1..31: mol_type = unassigned DNA; note = uncultivated organism sequence
gtaacattacacgaatacctgctaatgcagg

SEQ ID NO: 3473 - DNA, 31 bp, unidentified; identical to SEQ ID NO: 3472
  misc_feature 1..31: note = Category: MG11 effectors repeat
  misc_feature 1..31: note = Description: MG11-1 effector repeat
  source 1..31: mol_type = unassigned DNA; note = uncultivated organism sequence

SEQ ID NO: 3474 - DNA, 31 bp, unidentified; identical to SEQ ID NO: 3472
  misc_feature 1..31: note = Category: MG11 effectors repeat
  misc_feature 1..31: note = Description: MG11-1 effector repeat
  source 1..31: mol_type = unassigned DNA; note = uncultivated organism sequence

SEQ ID NO: 3475 - DNA, 25 bp, unidentified
  misc_feature 1..25: note = Category: MG11 effectors repeat
  misc_feature 1..25: note = Description: MG11-2 effector repeat
  source 1..25: mol_type = unassigned DNA; note = uncultivated organism sequence
aaaatagaatttctacttgtgtaga

SEQ ID NO: 3476 - DNA, 25 bp, unidentified
  misc_feature 1..25: note = Category: MG11 effectors repeat
  misc_feature 1..25: note = Description: MG11-2 effector repeat
  source 1..25: mol_type = unassigned DNA; note = uncultivated organism sequence
aaaatagaatttctacttgtgtaga

SEQ ID NO: 3477 - DNA, 25 bp, unidentified
  misc_feature 1..25: note = Category: MG11 effectors repeat
  misc_feature 1..25: note = Description: MG11-2 effector repeat
  source 1..25: mol_type = unassigned DNA; note = uncultivated organism sequence
aaaatagaatttctacttgtgtaga

SEQ ID NO: 3478 - DNA, 25 bp, unidentified
  misc_feature 1..25: note = Category: MG11 effectors repeat
  misc_feature 1..25: note = Description: MG11-2 effector repeat
  source 1..25: mol_type = unassigned DNA; note = uncultivated organism sequence
aaaatagaatttctacttgtgtaga

SEQ ID NO: 3479 - DNA, 25 bp, unidentified
  misc_feature 1..25: note = Category: MG11 effectors repeat
  misc_feature 1..25: note = Description: MG11-2 effector repeat
  source 1..25: mol_type = unassigned DNA; note = uncultivated organism sequence
aaaatagaatttctacttgtgtaga

SEQ ID NO: 3480 - DNA, 25 bp, unidentified
  misc_feature 1..25: note = Category: MG11 effectors repeat
  misc_feature 1..25: note = Description: MG11-2 effector repeat
  source 1..25: mol_type = unassigned DNA; note = uncultivated organism sequence
aaaatagaatttctacttgtgtaga

SEQ ID NO: 3481 - DNA, 25 bp, unidentified
  misc_feature 1..25: note = Category: MG11 effectors repeat
  misc_feature 1..25: note = Description: MG11-2 effector repeat
  source 1..25: mol_type = unassigned DNA; note = uncultivated organism sequence
aaaatagaatttctacttgtgtaga

SEQ ID NO: 3482 - DNA, 25 bp, unidentified
  misc_feature 1..25: note = Category: MG11 effectors repeat
  misc_feature 1..25: note = Description: MG11-2 effector repeat
  source 1..25: mol_type = unassigned DNA; note = uncultivated organism sequence
aaaatagaatttctacttgtgtaga

SEQ ID NO: 3483 - DNA, 25 bp, unidentified
  misc_feature 1..25: note = Category: MG11 effectors repeat
  misc_feature 1..25: note = Description: MG11-2 effector repeat
  source 1..25: mol_type = unassigned DNA; note = uncultivated organism sequence
aaaatagaatttctacttgtgtaga

SEQ ID NO: 3484 - DNA, 25 bp, unidentified
  misc_feature 1..25: note = Category: MG11 effectors repeat
  misc_feature 1..25: note = Description: MG11-2 effector repeat
  source 1..25: mol_type = unassigned DNA; note = uncultivated organism sequence
aaaatagaatttctacttgtgtaga

SEQ ID NO: 3485 - DNA, 25 bp, unidentified
  misc_feature 1..25: note = Category: MG11 effectors repeat
  misc_feature 1..25: note = Description: MG11-2 effector repeat
  source 1..25: mol_type = unassigned DNA; note = uncultivated organism sequence
aaaatagaatttctacttgtgtaga

SEQ ID NO: 3486 - DNA, 25 bp, unidentified
  misc_feature 1..25: note = Category: MG11 effectors repeat
  misc_feature 1..25: note = Description: MG11-2 effector repeat
  source 1..25: mol_type = unassigned DNA; note = uncultivated organism sequence
aaaatagaatttctacttgtgtaga

SEQ ID NO: 3487 - DNA, 37 bp, unidentified
  misc_feature 1..37: note = Category: MG11 effectors repeat
  misc_feature 1..37: note = Description: MG11-3 effector repeat
  source 1..37: mol_type = unassigned DNA; note = uncultivated organism sequence
ggctataaggccatattaatttctactattcgtagat

SEQ ID NO: 3488 - DNA, 37 bp, unidentified; identical to SEQ ID NO: 3487
  misc_feature 1..37: note = Category: MG11 effectors repeat
  misc_feature 1..37: note = Description: MG11-3 effector repeat
  source 1..37: mol_type = unassigned DNA; note = uncultivated organism sequence

SEQ ID NO: 3489 - DNA, 37 bp, unidentified; identical to SEQ ID NO: 3487
  misc_feature 1..37: note = Category: MG11 effectors repeat
  misc_feature 1..37: note = Description: MG11-3 effector repeat
  source 1..37: mol_type = unassigned DNA; note = uncultivated organism sequence

SEQ ID NO: 3490 - DNA, 37 bp, unidentified; identical to SEQ ID NO: 3487
  misc_feature 1..37: note = Category: MG11 effectors repeat
  misc_feature 1..37: note = Description: MG11-3 effector repeat
  source 1..37: mol_type = unassigned DNA; note = uncultivated organism sequence

SEQ ID NO: 3491 - DNA, 36 bp, unidentified
  misc_feature 1..36: note = Category: MG11 effectors repeat
  misc_feature 1..36: note = Description: MG11-5 effector repeat
  source 1..36: mol_type = unassigned DNA; note = uncultivated organism sequence
ggtgtaaaaccatatcaaatttctactaatgtagat

SEQ ID NO: 3492 - DNA, 36 bp, unidentified; identical to SEQ ID NO: 3491
  misc_feature 1..36: note = Category: MG11 effectors repeat
  misc_feature 1..36: note = Description: MG11-5 effector repeat
  source 1..36: mol_type = unassigned DNA; note = uncultivated organism sequence

SEQ ID NO: 3493 - DNA, 36 bp, unidentified; identical to SEQ ID NO: 3491
  misc_feature 1..36: note = Category: MG11 effectors repeat
  misc_feature 1..36: note = Description: MG11-5 effector repeat
  source 1..36: mol_type = unassigned DNA; note = uncultivated organism sequence

SEQ ID NO: 3494 - DNA, 36 bp, unidentified
  misc_feature 1..36: note = Category: MG11 effectors repeat
  misc_feature 1..36: note = Description: MG11-6 effector repeat
  source 1..36: mol_type = unassigned DNA; note = uncultivated organism sequence
ggtgtaagaccactgaaaatttctacttgtgtagat

SEQ ID NO: 3495 - DNA, 36 bp, unidentified
  misc_feature 1..36: note = Category: MG11 effectors repeat
  misc_feature 1..36: note = Description: MG11-7 effector repeat
  source 1..36: mol_type = unassigned DNA; note = uncultivated organism sequence
ggctataaagccattttaatttctactattgtagat

SEQ ID NO: 3496 - DNA, 36 bp, unidentified; identical to SEQ ID NO: 3495
  misc_feature 1..36: note = Category: MG11 effectors repeat
  misc_feature 1..36: note = Description: MG11-7 effector repeat
  source 1..36: mol_type = unassigned DNA; note = uncultivated organism sequence

SEQ ID NO: 3497 - DNA, 20 bp, unidentified
  misc_feature 1..20: note = Category: MG11 effectors repeat
  misc_feature 1..20: note = Description: MG11-8 effector repeat
  source 1..20: mol_type = unassigned DNA; note = uncultivated organism sequence
aaatatctacttctgtagat

SEQ ID NO: 3498 - DNA, 20 bp, unidentified
  misc_feature 1..20: note = Category: MG11 effectors repeat
  misc_feature 1..20: note = Description: MG11-8 effector repeat
  source 1..20: mol_type = unassigned DNA; note = uncultivated organism sequence
aaatatctacttctgtagat

SEQ ID NO: 3499 - DNA, 32 bp, unidentified
  misc_feature 1..32: note = Category: MG11 effectors repeat
  misc_feature 1..32: note = Description: MG11-10 effector repeat
  source 1..32: mol_type = unassigned DNA; note = uncultivated organism sequence
gcaacattacatgaatacctgctaatgcaggc

SEQ ID NO: 3500 - DNA, 32 bp, unidentified; identical to SEQ ID NO: 3499
  misc_feature 1..32: note = Category: MG11 effectors repeat
  misc_feature 1..32: note = Description: MG11-10 effector repeat
  source 1..32: mol_type = unassigned DNA; note = uncultivated organism sequence

SEQ ID NO: 3501 - DNA, 32 bp, unidentified; identical to SEQ ID NO: 3499
  misc_feature 1..32: note = Category: MG11 effectors repeat
  misc_feature 1..32: note = Description: MG11-10 effector repeat
  source 1..32: mol_type = unassigned DNA; note = uncultivated organism sequence

SEQ ID NO: 3502 - DNA, 32 bp, unidentified; identical to SEQ ID NO: 3499
  misc_feature 1..32: note = Category: MG11 effectors repeat
  misc_feature 1..32: note = Description: MG11-10 effector repeat
  source 1..32: mol_type = unassigned DNA; note = uncultivated organism sequence

SEQ ID NO: 3503 - DNA, 32 bp, unidentified; identical to SEQ ID NO: 3499
  misc_feature 1..32: note = Category: MG11 effectors repeat
  misc_feature 1..32: note = Description: MG11-10 effector repeat
  source 1..32: mol_type = unassigned DNA; note = uncultivated organism sequence

SEQ ID NO: 3504 - DNA, 32 bp, unidentified; identical to SEQ ID NO: 3499
  misc_feature 1..32: note = Category: MG11 effectors repeat
  misc_feature 1..32: note = Description: MG11-10 effector repeat
  source 1..32: mol_type = unassigned DNA; note = uncultivated organism sequence

SEQ ID NO: 3505 - DNA, 20 bp, unidentified
  misc_feature 1..20: note = Category: MG11 effectors repeat
  misc_feature 1..20: note = Description: MG11-11 effector repeat
  source 1..20: mol_type = unassigned DNA; note = uncultivated organism sequence
gaatacctgctaatgcaggc

SEQ ID NO: 3506 - DNA, 20 bp, unidentified
  misc_feature 1..20: note = Category: MG11 effectors repeat
  misc_feature 1..20: note = Description: MG11-11 effector repeat
  source 1..20: mol_type = unassigned DNA; note = uncultivated organism sequence
gaatacctgctaatgcaggc

SEQ ID NO: 3507 - DNA, 20 bp, unidentified
  misc_feature 1..20: note = Category: MG11 effectors repeat
  misc_feature 1..20: note = Description: MG11-12 effector repeat
  source 1..20: mol_type = unassigned DNA; note = uncultivated organism sequence
aaatacctgctaatgcaggc

SEQ ID NO: 3508 - DNA, 20 bp, unidentified
  misc_feature 1..20: note = Category: MG11 effectors repeat
  misc_feature 1..20: note = Description: MG11-12 effector repeat
  source 1..20: mol_type = unassigned DNA; note = uncultivated organism sequence
aaatacctgctaatgcaggc

SEQ ID NO: 3509 - DNA, 20 bp, unidentified
  misc_feature 1..20: note = Category: MG11 effectors repeat
  misc_feature 1..20: note = Description: MG11-12 effector repeat
  source 1..20: mol_type = unassigned DNA; note = uncultivated organism sequence
aaatacctgctaatgcaggc

SEQ ID NO: 3510 - DNA, 20 bp, unidentified
  misc_feature 1..20: note = Category: MG11 effectors repeat
  misc_feature 1..20: note = Description: MG11-12 effector repeat
  source 1..20: mol_type = unassigned DNA; note = uncultivated organism sequence
aaatacctgctaatgcaggc

SEQ ID NO: 3511 - DNA, 20 bp, unidentified
  misc_feature 1..20: note = Category: MG11 effectors repeat
  misc_feature 1..20: note = Description: MG11-12 effector repeat
  source 1..20: mol_type = unassigned DNA; note = uncultivated organism sequence
aaatacctgctaatgcaggc

SEQ ID NO: 3512 - DNA, 20 bp, unidentified
  misc_feature 1..20: note = Category: MG11 effectors repeat
  misc_feature 1..20: note = Description: MG11-12 effector repeat
  source 1..20: mol_type = unassigned DNA; note = uncultivated organism sequence
aaatacctgctaatgcaggc

SEQ ID NO: 3513 - DNA, 20 bp, unidentified
  misc_feature 1..20: note = Category: MG11 effectors repeat
  misc_feature 1..20: note = Description: MG11-12 effector repeat
  source 1..20: mol_type = unassigned DNA; note = uncultivated organism sequence
aaatacctgctaatgcaggc

SEQ ID NO: 3514 - DNA, 20 bp, unidentified
  misc_feature 1..20: note = Category: MG11 effectors repeat
  misc_feature 1..20: note = Description: MG11-12 effector repeat
  source 1..20: mol_type = unassigned DNA; note = uncultivated organism sequence
aaatacctgctaatgcaggc

SEQ ID NO: 3515 - DNA, 20 bp, unidentified
  misc_feature 1..20: note = Category: MG11 effectors repeat
  misc_feature 1..20: note = Description: MG11-12 effector repeat
  source 1..20: mol_type = unassigned DNA; note = uncultivated organism sequence
aaatacctgctaatgcaggc

SEQ ID NO: 3516 - DNA, 20 bp, unidentified
  misc_feature 1..20: note = Category: MG11 effectors repeat
  misc_feature 1..20: note = Description: MG11-12 effector repeat
  source 1..20: mol_type = unassigned DNA; note = uncultivated organism sequence
aaatacctgctaatgcaggc

SEQ ID NO: 3517 - DNA, 20 bp, unidentified
  misc_feature 1..20: note = Category: MG11 effectors repeat
  misc_feature 1..20: note = Description: MG11-12 effector repeat
  source 1..20: mol_type = unassigned DNA; note = uncultivated organism sequence
aaatacctgctaatgcaggc

SEQ ID NO: 3518 - DNA, 20 bp, unidentified
  misc_feature 1..20: note = Category: MG11 effectors repeat
  misc_feature 1..20: note = Description: MG11-12 effector repeat
  source 1..20: mol_type = unassigned DNA; note = uncultivated organism sequence
aaatacctgctaatgcaggc

SEQ ID NO: 3519 - DNA, 20 bp, unidentified
  misc_feature 1..20: note = Category: MG11 effectors repeat
  misc_feature 1..20: note = Description: MG11-12 effector repeat
  source 1..20: mol_type = unassigned DNA; note = uncultivated organism sequence
aaatacctgctaatgcaggc

SEQ ID NO: 3520 - DNA, 20 bp, unidentified
  misc_feature 1..20: note = Category: MG11 effectors repeat
  misc_feature 1..20: note = Description: MG11-12 effector repeat
  source 1..20: mol_type = unassigned DNA; note = uncultivated organism sequence
aaatacctgctaatgcaggc

SEQ ID NO: 3521 - DNA, 37 bp, unidentified
  misc_feature 1..37: note = Category: MG11 effectors repeat
  misc_feature 1..37: note = Description: MG11-13 effector repeat
  source 1..37: mol_type = unassigned DNA; note = uncultivated organism sequence
ggctataagaccatattaatttctactattcgtagac

SEQ ID NO: 3522 - DNA, 37 bp, unidentified; identical to SEQ ID NO: 3521
  misc_feature 1..37: note = Category: MG11 effectors repeat
  misc_feature 1..37: note = Description: MG11-13 effector repeat
  source 1..37: mol_type = unassigned DNA; note = uncultivated organism sequence

SEQ ID NO: 3523 - DNA, 37 bp, unidentified
  misc_feature 1..37: note = Category: MG11 effectors repeat
  misc_feature 1..37: note = Description: MG11-14 effector repeat
  source 1..37: mol_type = unassigned DNA; note = uncultivated organism sequence
ggctataaggccatattaatttctactattcgtagac

SEQ ID NO: 3524 - DNA, 37 bp, unidentified; identical to SEQ ID NO: 3523
  misc_feature 1..37: note = Category: MG11 effectors repeat
  misc_feature 1..37: note = Description: MG11-14 effector repeat
  source 1..37: mol_type = unassigned DNA; note = uncultivated organism sequence

SEQ ID NO: 3525 - DNA, 36 bp, unidentified
  misc_feature 1..36: note = Category: MG11 effectors repeat
  misc_feature 1..36: note = Description: MG11-15 effector repeat
  source 1..36: mol_type = unassigned DNA; note = uncultivated organism sequence
ggctatatgccaatataatttctactttacgtagat

SEQ ID NO: 3526 - DNA, 36 bp, unidentified
  misc_feature 1..36: note = Category: MG11 effectors repeat
  misc_feature 1..36: note = Description: MG11-16 effector repeat
  source 1..36: mol_type = unassigned DNA; note = uncultivated organism sequence
ggctataaaccggtataatttctactattcgtagat

SEQ ID NO: 3527 - DNA, 36 bp, unidentified; identical to SEQ ID NO: 3526
  misc_feature 1..36: note = Category: MG11 effectors repeat
  misc_feature 1..36: note = Description: MG11-16 effector repeat
  source 1..36: mol_type = unassigned DNA; note = uncultivated organism sequence

SEQ ID NO: 3528 - DNA, 36 bp, unidentified; identical to SEQ ID NO: 3526
  misc_feature 1..36: note = Category: MG11 effectors repeat
  misc_feature 1..36: note = Description: MG11-16 effector repeat
  source 1..36: mol_type = unassigned DNA; note = uncultivated organism sequence

SEQ ID NO: 3529 - DNA, 35 bp, unidentified
  misc_feature 1..35: note = Category: MG11 effectors repeat
  misc_feature 1..35: note = Description: MG11-17 effector repeat
  source 1..35: mol_type = unassigned DNA; note = uncultivated organism sequence
gtttataagtaatatttaatttctactttcgtaga

SEQ ID NO: 3530 - DNA, 35 bp, unidentified; identical to SEQ ID NO: 3529
  misc_feature 1..35: note = Category: MG11 effectors repeat
  misc_feature 1..35: note = Description: MG11-17 effector repeat
  source 1..35: mol_type = unassigned DNA; note = uncultivated organism sequence

SEQ ID NO: 3531 - DNA, 35 bp, unidentified; identical to SEQ ID NO: 3529
  misc_feature 1..35: note = Category: MG11 effectors repeat
  misc_feature 1..35: note = Description: MG11-17 effector repeat
  source 1..35: mol_type = unassigned DNA; note = uncultivated organism sequence

SEQ ID NO: 3532 - DNA, 35 bp, unidentified; identical to SEQ ID NO: 3529
  misc_feature 1..35: note = Category: MG11 effectors repeat
  misc_feature 1..35: note = Description: MG11-17 effector repeat
  source 1..35: mol_type = unassigned DNA; note = uncultivated organism sequence

SEQ ID NO: 3533 - DNA, 35 bp, unidentified; identical to SEQ ID NO: 3529
  misc_feature 1..35: note = Category: MG11 effectors repeat
  misc_feature 1..35: note = Description: MG11-17 effector repeat
  source 1..35: mol_type = unassigned DNA; note = uncultivated organism sequence

SEQ ID NO: 3534 - DNA, 35 bp, unidentified; identical to SEQ ID NO: 3529
  misc_feature 1..35: note = Category: MG11 effectors repeat
  misc_feature 1..35: note = Description: MG11-17 effector repeat
  source 1..35: mol_type = unassigned DNA; note = uncultivated organism sequence

SEQ ID NO: 3535 - DNA, 35 bp, unidentified; identical to SEQ ID NO: 3529
  misc_feature 1..35: note = Category: MG11 effectors repeat
  misc_feature 1..35: note = Description: MG11-17 effector repeat
  source 1..35: mol_type = unassigned DNA; note = uncultivated organism sequence

SEQ ID NO: 3536 - DNA, 35 bp, unidentified; identical to SEQ ID NO: 3529
  misc_feature 1..35: note = Category: MG11 effectors repeat
  misc_feature 1..35: note = Description: MG11-17 effector repeat
  source 1..35: mol_type = unassigned DNA; note = uncultivated organism sequence

SEQ ID NO: 3537 - DNA, 35 bp, unidentified; identical to SEQ ID NO: 3529
  misc_feature 1..35: note = Category: MG11 effectors repeat
  misc_feature 1..35: note = Description: MG11-17 effector repeat
  source 1..35: mol_type = unassigned DNA; note = uncultivated organism sequence

SEQ ID NO: 3538 - DNA, 35 bp, unidentified; identical to SEQ ID NO: 3529
  misc_feature 1..35: note = Category: MG11 effectors repeat
  misc_feature 1..35: note = Description: MG11-17 effector repeat
  source 1..35: mol_type = unassigned DNA; note = uncultivated organism sequence

SEQ ID NO: 3539 - skipped

SEQ ID NO: 3540 - DNA, 36 bp, unidentified
  misc_feature 1..36: note = Category: MG13 effectors repeat
  misc_feature 1..36: note = Description: MG13-1 effector repeat
  source 1..36: mol_type = unassigned DNA; note = uncultivated organism sequence
ggctataaagcctatttaatttctactgttgtagat

SEQ ID NO: 3541 - DNA, 36 bp, unidentified
  misc_feature 1..36: note = Category: MG13 effectors repeat
  misc_feature 1..36: note = Description: MG13-3 effector repeat
  source 1..36: mol_type = unassigned DNA; note = uncultivated organism sequence
gactataaatcctatttaatttctactattgtagat

SEQ ID NO: 3542 - DNA, 36 bp, unidentified; identical to SEQ ID NO: 3541
  misc_feature 1..36: note = Category: MG13 effectors repeat
  misc_feature 1..36: note = Description: MG13-3 effector repeat
  source 1..36: mol_type = unassigned DNA; note = uncultivated organism sequence

SEQ ID NO: 3543 - DNA, 36 bp, unidentified; identical to SEQ ID NO: 3541
  misc_feature 1..36: note = Category: MG13 effectors repeat
  misc_feature 1..36: note = Description: MG13-4 effector repeat
  source 1..36: mol_type = unassigned DNA; note = uncultivated organism sequence

SEQ ID NO: 3544 - DNA, 36 bp, unidentified; identical to SEQ ID NO: 3541
  misc_feature 1..36: note = Category: MG13 effectors repeat
  misc_feature 1..36: note = Description: MG13-4 effector repeat
  source 1..36: mol_type = unassigned DNA; note = uncultivated organism sequence

SEQ ID NO: 3545 - DNA, 36 bp, unidentified
  misc_feature 1..36: note = Category: MG13 effectors repeat
  misc_feature 1..36: note = Description: MG13-6 effector repeat
  source 1..36: mol_type = unassigned DNA; note = uncultivated organism sequence
gtctatagatataaagtaatttctactgttgtagat

SEQ ID NO: 3546 - DNA, 36 bp, unidentified
  misc_feature 1..36: note = Category: MG13 effectors repeat
  misc_feature 1..36: note = Description: MG13-7 effector repeat
  source 1..36: mol_type = unassigned DNA; note = uncultivated organism sequence
gcctataagggccattaaatttctactgttgtagat

SEQ ID NO: 3547 - DNA, 36 bp, unidentified; identical to SEQ ID NO: 3546
  misc_feature 1..36: note = Category: MG13 effectors repeat
  misc_feature 1..36: note = Description: MG13-7 effector repeat
  source 1..36: mol_type = unassigned DNA; note = uncultivated organism sequence

SEQ ID NO: 3548 - DNA, 36 bp, unidentified; identical to SEQ ID NO: 3546
  misc_feature 1..36: note = Category: MG13 effectors repeat
  misc_feature 1..36: note = Description: MG13-7 effector repeat
  source 1..36: mol_type = unassigned DNA; note = uncultivated organism sequence

SEQ ID NO: 3549 - DNA, 36 bp, unidentified; identical to SEQ ID NO: 3546
  misc_feature 1..36: note = Category: MG13 effectors repeat
  misc_feature 1..36: note = Description: MG13-7 effector repeat
  source 1..36: mol_type = unassigned DNA; note = uncultivated organism sequence

SEQ ID NO: 3550 - DNA, 36 bp, unidentified
  misc_feature 1..36: note = Category: MG13 effectors repeat
  misc_feature 1..36: note = Description: MG13-8 effector repeat
  source 1..36: mol_type = unassigned DNA; note = uncultivated organism sequence
gtctgtaagactaatataatttctactattgtagat

SEQ ID NO: 3551 - RNA, 45 nt, unidentified
  misc_feature 1..45: note = Category: MG19 Guide RNA
  misc_feature 1..45: note = Description: MG19-2 dual guide RNA1
  variation 26..45: note = any nucleotide
  source 1..45: mol_type = unassigned RNA; note = uncultivated organism sequence
caccgaaagttagggacaaaaaggcnnnnnnnnnnnnnnnnnnnn

SEQ ID NO: 3552 - RNA, 96 nt, unidentified
  misc_feature 1..96: note = Category: MG19 Guide RNA
  misc_feature 1..96: note = Description: MG19-2 dual guide RNA2
  source 1..96: mol_type = unassigned RNA; note = uncultivated organism sequence
gggtccctaacccaatgcgctcaagcggttttccctcttgataataatcaagagattgccttttcgacttttagtcgttactgcttgagcgcgcaa

SEQ ID NO: 3553 - RNA, 45 nt, unidentified
  misc_feature 1..45: note = Category: MG19 Guide RNA
  misc_feature 1..45: note = Description: MG19-3 dual guide RNA1
  variation 26..45: note = any nucleotide
  source 1..45: mol_type = unassigned RNA; note = uncultivated organism sequence
catcgaaagttagggactaaaaggcnnnnnnnnnnnnnnnnnnnn

SEQ ID NO: 3554 - RNA, 79 nt, unidentified
  misc_feature 1..79: note = Category: MG19 Guide RNA
  misc_feature 1..79: note = Description: MG19-3 dual guide RNA2
  source 1..79: mol_type = unassigned RNA; note = uncultivated organism sequence
gagttcctaactcaagcgcctttgcgctttcccgttaacgaaagttaacgatgccttttagtgcagaggcgcaattttt

SEQ ID NO: 3555 - RNA, 45 nt, unidentified
  misc_feature 1..45: note = Category: MG19 Guide RNA
  misc_feature 1..45: note = Description: MG19-4 dual guide RNA1
  variation 26..45: note = any nucleotide
  source 1..45: mol_type = unassigned RNA; note = uncultivated organism sequence
catcgaaagttaggaaccaaaaggcnnnnnnnnnnnnnnnnnnnn

SEQ ID NO: 3556 - RNA, 101 nt, unidentified
  misc_feature 1..101: note = Category: MG19 Guide RNA
  misc_feature 1..101: note = Description: MG19-4 dual guide RNA2
  source 1..101: mol_type = unassigned RNA; note = uncultivated organism sequence
gggttcctaaccttagcgctcttgcgctttccccaaccgaaaggttggttgcctttccctttttgggttcccaaaaggaacagtgcaagggcgcgcaattt

SEQ ID NO: 3557 - RNA, 45 nt, unidentified
  misc_feature 1..45: note = Category: MG19 Guide RNA
  misc_feature 1..45: note = Description: MG19-5 dual guide RNA1
  variation 26..45: note = any nucleotide
  source 1..45: mol_type = unassigned RNA; note = uncultivated organism sequence
catcgaatattaggaaccaaaaggcnnnnnnnnnnnnnnnnnnnn

SEQ ID NO: 3558 - RNA, 81 nt, unidentified
  misc_feature 1..81: note = Category: MG19 Guide RNA
  misc_feature 1..81: note = Description: MG19-5 dual guide RNA1
  source 1..81: mol_type = unassigned RNA; note = uncultivated organism sequence
gggttcctaatatctatgcgcccttgcgctttccacttcataataaaatgaagtttgccttgtagtgcaagggcgcttttt

SEQ ID NO: 3559 - RNA, 127 nt, synthetic construct
  source 1..127: mol_type = other RNA; note = MG20-1 sgRNA
atcgtgcttttagtattttctttgagcactcgaaacagaaaggaaaacccaactgtttcacgaatctttgacaacttggaagaaattctaagaaggattcatcaaagnnnnnnnnnnnnnnnnnnnn

SEQ ID NO: 3560 - DNA, 36 bp, unidentified
  misc_feature 1..36: note = Category: MG26 effectors repeat
  misc_feature 1..36: note = Description: MG26-1 effector repeat
  source 1..36: mol_type = unassigned DNA; note = uncultivated organism sequence
ctcgaaaaccaatatcgaatttctacttttgtagat

SEQ ID NO: 3561 - DNA, 36 bp, unidentified
  misc_feature 1..36: note = Category: MG26 effectors repeat
  misc_feature 1..36: note = Description: MG26-5 effector repeat
  source 1..36: mol_type = unassigned DNA; note = uncultivated organism sequence
atttaaacataatatctaatctctacttttgtagat

SEQ ID NO: 3562 - DNA, 36 bp, unidentified; identical to SEQ ID NO: 3561
  misc_feature 1..36: note = Category: MG26 effectors repeat
  misc_feature 1..36: note = Description: MG26-5 effector repeat
  source 1..36: mol_type = unassigned DNA; note = uncultivated organism sequence

SEQ ID NO: 3563 - DNA, 36 bp, unidentified; identical to SEQ ID NO: 3561
  misc_feature 1..36: note = Category: MG26 effectors repeat
  misc_feature 1..36: note = Description: MG26-5 effector repeat
  source 1..36: mol_type = unassigned DNA; note = uncultivated organism sequence

SEQ ID NO: 3564 - DNA, 36 bp, unidentified; identical to SEQ ID NO: 3561
  misc_feature 1..36: note = Category: MG26 effectors repeat
  misc_feature 1..36: note = Description: MG26-5 effector repeat
  source 1..36: mol_type = unassigned DNA; note = uncultivated organism sequence

SEQ ID NO: 3565 - DNA, 36 bp, unidentified
  misc_feature 1..36: note = Category: MG26 effectors repeat
  misc_feature 1..36: note = Description: MG26-12 effector repeat
  source 1..36: mol_type = unassigned DNA; note = uncultivated organism sequence
ctctaaacctcatataaaatttctacttttgtagat

SEQ ID NO: 3566 - DNA, 37 bp, unidentified
  misc_feature 1..37: note = Category: MG26 effectors repeat
  misc_feature 1..37: note = Description: MG26-14 effector repeat
  source 1..37: mol_type = unassigned DNA; note = uncultivated organism sequence
agtttaaacataatattaaatttctactttggtagat

SEQ ID NO: 3567 - DNA, 37 bp, unidentified; identical to SEQ ID NO: 3566
  misc_feature 1..37: note = Category: MG26 effectors repeat
  misc_feature 1..37: note = Description: MG26-14 effector repeat
  source 1..37: mol_type = unassigned DNA; note = uncultivated organism sequence

SEQ ID NO: 3568 - DNA, 37 bp, unidentified; identical to SEQ ID NO: 3566
  misc_feature 1..37: note = Category: MG26 effectors repeat
  misc_feature 1..37: note = Description: MG26-14 effector repeat
  source 1..37: mol_type = unassigned DNA; note = uncultivated organism sequence

SEQ ID NO: 3569 - DNA, 37 bp, unidentified; identical to SEQ ID NO: 3566
  misc_feature 1..37: note = Category: MG26 effectors repeat
  misc_feature 1..37: note = Description: MG26-14 effector repeat
  source 1..37: mol_type = unassigned DNA; note = uncultivated organism sequence

SEQ ID NO: 3570 - DNA, 37 bp, unidentified; identical to SEQ ID NO: 3566
  misc_feature 1..37: note = Category: MG26 effectors repeat
  misc_feature 1..37: note = Description: MG26-14 effector repeat
  source 1..37: mol_type = unassigned DNA; note = uncultivated organism sequence

SEQ ID NO: 3571 - DNA, 36 bp, unidentified
  misc_feature 1..36: note = Category: MG26 effectors repeat
  misc_feature 1..36: note = Description: MG26-16 effector repeat
  source 1..36: mol_type = unassigned DNA; note = uncultivated organism sequence
ctctaaaacccccatctgatttctacttttgtagat

SEQ ID NO: 3572 - DNA, 36 bp, unidentified; identical to SEQ ID NO: 3571
  misc_feature 1..36: note = Category: MG26 effectors repeat
  misc_feature 1..36: note = Description: MG26-16 effector repeat
  source 1..36: mol_type = unassigned DNA; note = uncultivated organism sequence

SEQ ID NO: 3573 - DNA, 36 bp, unidentified
  misc_feature 1..36: note = Category: MG28 effectors repeat
  misc_feature 1..36: note = Description: MG28-1 effector repeat
  source 1..36: mol_type = unassigned DNA; note = uncultivated organism sequence
gtctataaagacaattaaatttctactatgtagatc

SEQ ID NO: 3574 - DNA, 36 bp, unidentified; identical to SEQ ID NO: 3573
  misc_feature 1..36: note = Category: MG28 effectors repeat
  misc_feature 1..36: note = Description: MG28-1 effector repeat
  source 1..36: mol_type = unassigned DNA; note = uncultivated organism sequence

SEQ ID NO: 3575 - DNA, 36 bp, unidentified
  misc_feature 1..36: note = Category: MG28 effectors repeat
  misc_feature 1..36: note = Description: MG28-5 effector repeat
  source 1..36: mol_type = unassigned DNA; note = uncultivated organism sequence
ggtgttagaccatacaaaatttctactattgtagat

SEQ ID NO: 3576 - DNA, 36 bp, unidentified
  misc_feature 1..36: note = Category: MG28 effectors repeat
  misc_feature 1..36: note = Description: MG28-7 effector repeat
  source 1..36: mol_type = unassigned DNA; note = uncultivated organism sequence
ggctataatgcctatataatttctactattgtagat

SEQ ID NO: 3577 - DNA, 36 bp, unidentified
  misc_feature 1..36: note = Category: MG28 effectors repeat
  misc_feature 1..36: note = Description: MG28-8 effector repeat
  source 1..36: mol_type = unassigned DNA; note = uncultivated organism sequence
ggctataatgcctatataatttctactattgtagac

SEQ ID NO: 3578 - DNA, 36 bp, unidentified; identical to SEQ ID NO: 3577
  misc_feature 1..36: note = Category: MG28 effectors repeat
  misc_feature 1..36: note = Description: MG28-8 effector repeat
  source 1..36: mol_type = unassigned DNA; note = uncultivated organism sequence

SEQ ID NO: 3579 - DNA, 26 bp, unidentified
  misc_feature 1..26: note = Category: MG28 effectors repeat
  misc_feature 1..26: note = Description: MG28-10 effector repeat
  source 1..26: mol_type = unassigned DNA; note = uncultivated organism sequence
catataaaatttctactattgtagat

SEQ ID NO: 3580 - DNA, 26 bp, unidentified
  misc_feature 1..26: note = Category: MG28 effectors repeat
  misc_feature 1..26: note = Description: MG28-10 effector repeat
  source 1..26: mol_type = unassigned DNA; note = uncultivated organism sequence
catataaaatttctactattgtagat

SEQ ID NO: 3581 - DNA, 26 bp, unidentified
  misc_feature 1..26: note = Category: MG28 effectors repeat
  misc_feature 1..26: note = Description: MG28-10 effector repeat
  source 1..26: mol_type = unassigned DNA; note = uncultivated organism sequence
catataaaatttctactattgtagat

SEQ ID NO: 3582 - DNA, 26 bp, unidentified
  misc_feature 1..26: note = Category: MG28 effectors repeat
  misc_feature 1..26: note = Description: MG28-10 effector repeat
  source 1..26: mol_type = unassigned DNA; note = uncultivated organism sequence
catataaaatttctactattgtagat

SEQ ID NO: 3583 - DNA, 26 bp, unidentified
  misc_feature 1..26: note = Category: MG28 effectors repeat
  misc_feature 1..26: note = Description: MG28-10 effector repeat
  source 1..26: mol_type = unassigned DNA; note = uncultivated organism sequence
catataaaatttctactattgtagat

SEQ ID NO: 3584 - DNA, 26 bp, unidentified
  misc_feature 1..26: note = Category: MG28 effectors repeat
  misc_feature 1..26: note = Description: MG28-11 effector repeat
  source 1..26: mol_type = unassigned DNA; note = uncultivated organism sequence
catataaaatttctactattgtagat

SEQ ID NO: 3585 - DNA, 26 bp, unidentified
  misc_feature 1..26: note = Category: MG28 effectors repeat
  misc_feature 1..26: note = Description: MG28-11 effector repeat
  source 1..26: mol_type = unassigned DNA; note = uncultivated organism sequence
catataaaatttctactattgtagat

SEQ ID NO: 3586 - DNA, 26 bp, unidentified
  misc_feature 1..26: note = Category: MG28 effectors repeat
  misc_feature 1..26: note = Description: MG28-11 effector repeat
  source 1..26: mol_type = unassigned DNA; note = uncultivated organism sequence
catataaaatttctactattgtagat

SEQ ID NO: 3587 - DNA, 26 bp, unidentified
  misc_feature 1..26: note = Category: MG28 effectors repeat
  misc_feature 1..26: note = Description: MG28-11 effector repeat
  source 1..26: mol_type = unassigned DNA; note = uncultivated organism sequence
catataaaatttctactattgtagat

SEQ ID NO: 3588 - DNA, 26 bp, unidentified
  misc_feature 1..26: note = Category: MG28 effectors repeat
  misc_feature 1..26: note = Description: MG28-11 effector repeat
  source 1..26: mol_type = unassigned DNA; note = uncultivated organism sequence
catataaaatttctactattgtagat

SEQ ID NO: 3589 - DNA, 36 bp, unidentified
  misc_feature 1..36: note = Category: MG28 effectors repeat
  misc_feature 1..36: note = Description: MG28-12 effector repeat
  source 1..36: mol_type = unassigned DNA; note = uncultivated organism sequence
gatgtaaaactacacataatttctactattgtagat

SEQ ID NO: 3590 - DNA, 36 bp, unidentified; identical to SEQ ID NO: 3589
  misc_feature 1..36: note = Category: MG28 effectors repeat
  misc_feature 1..36: note = Description: MG28-12 effector repeat
  source 1..36: mol_type = unassigned DNA; note = uncultivated organism sequence

SEQ ID NO: 3591 - DNA, 36 bp, unidentified; identical to SEQ ID NO: 3589
  misc_feature 1..36: note = Category: MG28 effectors repeat
  misc_feature 1..36: note = Description: MG28-12 effector repeat
  source 1..36: mol_type = unassigned DNA; note = uncultivated organism sequence

SEQ ID NO: 3592 - DNA, 36 bp, unidentified; identical to SEQ ID NO: 3589
  misc_feature 1..36: note = Category: MG28 effectors repeat
  misc_feature 1..36: note = Description: MG28-12 effector repeat
  source 1..36: mol_type = unassigned DNA; note = uncultivated organism sequence

SEQ ID NO: 3593 - DNA, 36 bp, unidentified
  misc_feature 1..36: note = Category: MG28 effectors repeat
  misc_feature 1..36: note = Description: MG28-13 effector repeat
  source 1..36: mol_type = unassigned DNA; note = uncultivated organism sequence
ggctataactcctcaataatttctactatcgtagat

SEQ ID NO: 3594 - DNA, 36 bp, unidentified; identical to SEQ ID NO: 3593
  misc_feature 1..36: note = Category: MG28 effectors repeat
  misc_feature 1..36: note = Description: MG28-13 effector repeat
  source 1..36: mol_type = unassigned DNA; note = uncultivated organism sequence

SEQ ID NO: 3595 - DNA, 36 bp, unidentified
  misc_feature 1..36: note = Category: MG28 effectors repeat
  misc_feature 1..36: note = Description: MG28-14 effector repeat
  source 1..36: mol_type = unassigned DNA; note = uncultivated organism sequence
ggctataactcctcaataatttctactattgtagat

SEQ ID NO: 3596 - DNA, 36 bp, unidentified
  misc_feature 1..36: note = Category: MG28 effectors repeat
  misc_feature 1..36: note = Description: MG28-17 effector repeat
  source 1..36: mol_type = unassigned DNA; note = uncultivated organism sequence
gtctaacagacatttataatttctactattgtagat

SEQ ID NO: 3597 - DNA, 36 bp, unidentified
  misc_feature 1..36: note = Category: MG28 effectors repeat
  misc_feature 1..36: note = Description: MG28-19 effector repeat
  source 1..36: mol_type = unassigned DNA; note = uncultivated organism sequence
ggctataagccaaacaaatttctactaagtgtagat

SEQ ID NO: 3598 - DNA, 36 bp, unidentified
  misc_feature 1..36: note = Category: MG28 effectors repeat
  misc_feature 1..36: note = Description: MG28-20 effector repeat
  source 1..36: mol_type = unassigned DNA; note = uncultivated organism sequence
ggtgtaaaagcatacaaaatatctactattgtagat

SEQ ID NO: 3599 - DNA, 36 bp, unidentified; identical to SEQ ID NO: 3598
  misc_feature 1..36: note = Category: MG28 effectors repeat
  misc_feature 1..36: note = Description: MG28-20 effector repeat
  source 1..36: mol_type = unassigned DNA; note = uncultivated organism sequence

SEQ ID NO: 3600 - DNA, 36 bp, unidentified
  misc_feature 1..36: note = Category: MG28 effectors repeat
  misc_feature 1..36: note = Description: MG28-22 effector repeat
  source 1..36: mol_type = unassigned DNA; note = uncultivated organism sequence
ggctataaaccaaacaaatttctactaaatgtagat

SEQ ID NO: 3601 - DNA, 36 bp, unidentified; identical to SEQ ID NO: 3600
  misc_feature 1..36: note = Category: MG28 effectors repeat
  misc_feature 1..36: note = Description: MG28-22 effector repeat
  source 1..36: mol_type = unassigned DNA; note = uncultivated organism sequence

SEQ ID NO: 3602 - DNA, 36 bp, unidentified; identical to SEQ ID NO: 3600
  misc_feature 1..36: note = Category: MG28 effectors repeat
  misc_feature 1..36: note = Description: MG28-22 effector repeat
  source 1..36: mol_type = unassigned DNA; note = uncultivated organism sequence

SEQ ID NO: 3603 - DNA, 36 bp, unidentified
  misc_feature 1..36: note = Category: MG28 effectors repeat
  misc_feature 1..36: note = Description: MG28-23 effector repeat
  source 1..36: mol_type = unassigned DNA; note = uncultivated organism sequence
cgtgtttagatatacagaatttctactattgtagat

SEQ ID NO: 3604 - DNA, 36 bp, unidentified
  misc_feature 1..36: note = Category: MG28 effectors repeat
  misc_feature 1..36: note = Description: MG28-24 effector repeat
  source 1..36: mol_type = unassigned DNA; note = uncultivated organism sequence
gtctatagaacccttttaatttctactattgtagat

SEQ ID NO: 3605 - DNA, 28 bp, unidentified
  misc_feature 1..28: note = Category: MG28 effectors repeat
  misc_feature 1..28: note = Description: MG28-25 effector repeat
  source 1..28: mol_type = unassigned DNA; note = uncultivated organism sequence
ataagatttaatatctactattgtagat

SEQ ID NO: 3606 - DNA, 28 bp, unidentified
  misc_feature 1..28: note = Category: MG28 effectors repeat
  misc_feature 1..28: note = Description: MG28-25 effector repeat
  source 1..28: mol_type = unassigned DNA; note = uncultivated organism sequence
ataagatttaatatctactattgtagat

SEQ ID NO: 3607 - DNA, 28 bp, unidentified
  misc_feature 1..28: note = Category: MG28 effectors repeat
  misc_feature 1..28: note = Description: MG28-25 effector repeat
  source 1..28: mol_type = unassigned DNA; note = uncultivated organism sequence
ataagatttaatatctactattgtagat

SEQ ID NO: 3608 - RNA, 43 nt, synthetic construct
  misc_feature 1..43: note = Category: MG28 effectors, MG30 active effectors crRNA sequence
  misc_feature 1..43: note = Description: MG28-1, MG30-1 crRNA sequence
  source 1..43: mol_type = other RNA
  variation 20..43: note = any nucleotide
aatttctactattgtagatnnnnnnnnnnnnnnnnnnnnnnnn

SEQ ID NO: 3609 - RNA, 44 nt, unidentified
  misc_feature 1..44: note = Category: MG28, MG29, MG30, MG31 crRNA sequence
  misc_feature 1..44: note = Description: MG28, MG29, MG30, MG31 crRNA sequence example 8
  variation 21..44: note = any nucleotide
  source 1..44: mol_type = other RNA; note = MG28, MG29, MG30, MG31 crRNA sequence
taatttctactgttgtagatnnnnnnnnnnnnnnnnnnnnnnnn

SEQ ID NO: 3610 - DNA, 36 bp, unidentified
  misc_feature 1..36: note = Category: MG29 effectors repeat
  misc_feature 1..36: note = Description: MG29-1 effector repeat
  source 1..36: mol_type = unassigned DNA; note = uncultivated organism sequence
gtctaagaccttacttaaatttctactgttgtagat

SEQ ID NO: 3611 - DNA, 36 bp, unidentified
  misc_feature 1..36: note = Category: MG29 effectors repeat
  misc_feature 1..36: note = Description: MG29-7 effector repeat
  source 1..36: mol_type = unassigned DNA; note = uncultivated organism sequence
gtctaagaccgaccttaaatttctactgttgtagat

SEQ ID NO: 3612 - RNA, 43 nt, unidentified
  source 1..43: mol_type = other RNA; note = MG29-5 sgRNA; note = uncultivated organism sequence
aatttctacagttgtagatnnnnnnnnnnnnnnnnnnnnnnnn

SEQ ID NO: 3613 - DNA, 36 bp, unidentified
  misc_feature 1..36: note = Category: MG30 effectors repeat
  misc_feature 1..36: note = Description: MG30-1 effector repeat
  source 1..36: mol_type = unassigned DNA; note = uncultivated organism sequence
ctctagggctacccttaaatttctactattgtagat

SEQ ID NO: 3614 - DNA, 36 bp, unidentified; identical to SEQ ID NO: 3613
  misc_feature 1..36: note = Category: MG30 effectors repeat
  misc_feature 1..36: note = Description: MG30-1 effector repeat
  source 1..36: mol_type = unassigned DNA; note = uncultivated organism sequence

SEQ ID NO: 3615 - DNA, 36 bp, unidentified; identical to SEQ ID NO: 3613
  misc_feature 1..36: note = Category: MG30 effectors repeat
  misc_feature 1..36: note = Description: MG30-1 effector repeat
  source 1..36: mol_type = unassigned DNA; note = uncultivated organism sequence

SEQ ID NO: 3616 - DNA, 36 bp, unidentified
  misc_feature 1..36: note = Category: MG31 effectors repeat
  misc_feature 1..36: note = Description: MG31-1 effector repeat
  source 1..36: mol_type = unassigned DNA; note = uncultivated organism sequence
gtttaagacaaatacaaaatttctactgttgtagat

SEQ ID NO: 3617 - DNA, 29 bp, unidentified
  misc_feature 1..29: note = Category: MG31 effectors repeat
  misc_feature 1..29: note = Description: MG31-5 effector repeat
  source 1..29: mol_type = unassigned DNA; note = uncultivated organism sequence
actgatatagaatttctactgttgtagat

SEQ ID NO: 3618 - DNA, 29 bp, unidentified
  misc_feature 1..29: note = Category: MG31 effectors repeat
  misc_feature 1..29: note = Description: MG31-5 effector repeat
  source 1..29: mol_type = unassigned DNA; note = uncultivated organism sequence
actgatatagaatttctactgttgtagat

SEQ ID NO: 3619 - DNA, 29 bp, unidentified
  misc_feature 1..29: note = Category: MG31 effectors repeat
  misc_feature 1..29: note = Description: MG31-5 effector repeat
  source 1..29: mol_type = unassigned DNA; note = uncultivated organism sequence
actgatatagaatttctactgttgtagat

SEQ ID NO: 3620 - DNA, 36 bp, unidentified
  misc_feature 1..36: note = Category: MG31 effectors repeat
  misc_feature 1..36: note = Description: MG31-8 effector repeat
  source 1..36: mol_type = unassigned DNA; note = uncultivated organism sequence
cgttaagacaaatacaaaatttctactgtcgtagat

SEQ ID NO: 3621 - DNA, 36 bp, unidentified; identical to SEQ ID NO: 3620
  misc_feature 1..36: note = Category: MG31 effectors repeat
  misc_feature 1..36: note = Description: MG31-8 effector repeat
  source 1..36: mol_type = unassigned DNA; note = uncultivated organism sequence

SEQ ID NO: 3622 - DNA, 36 bp, unidentified; identical to SEQ ID NO: 3620
  misc_feature 1..36: note = Category: MG31 effectors repeat
  misc_feature 1..36: note = Description: MG31-8 effector repeat
  source 1..36: mol_type = unassigned DNA; note = uncultivated organism sequence

SEQ ID NO: 3623 - DNA, 36 bp, unidentified
  misc_feature 1..36: note = Category: MG31 effectors repeat
  misc_feature 1..36: note = Description: MG31-9 effector repeat
  source 1..36: mol_type = unassigned DNA; note = uncultivated organism sequence
gtttcaaagtgaactaaaatttctactgttgtagat

SEQ ID NO: 3624 - DNA, 36 bp, unidentified
  misc_feature 1..36: note = Category: MG31 effectors repeat
  misc_feature 1..36: note = Description: MG31-10 effector repeat
  source 1..36: mol_type = unassigned DNA; note = uncultivated organism sequence
gtttgaacttcatactaaatttctactgttgtagat

SEQ ID NO: 3625 - DNA, 20 bp, unidentified
  misc_feature 1..20: note = Category: MG31 effectors repeat
  misc_feature 1..20: note = Description: MG31-11 effector repeat
  source 1..20: mol_type = unassigned DNA; note = uncultivated organism sequence
gaatttctactgttgtagat

SEQ ID NO: 3626 - DNA, 20 bp, unidentified
  misc_feature 1..20: note = Category: MG31 effectors repeat
  misc_feature 1..20: note = Description: MG31-11 effector repeat
  source 1..20: mol_type = unassigned DNA; note = uncultivated organism sequence
gaatttctactgttgtagat

SEQ ID NO: 3627 - DNA, 36 bp, unidentified
  misc_feature 1..36: note = Category: MG31 effectors repeat
  misc_feature 1..36: note = Description: MG31-16 effector repeat
  source 1..36: mol_type = unassigned DNA; note = uncultivated organism sequence
gtttcaaactgaataagaatttctactgttgtagat

SEQ ID NO: 3628 - DNA, 36 bp, unidentified
  misc_feature 1..36: note = Category: MG31 effectors repeat
  misc_feature 1..36: note = Description: MG31-17 effector repeat
  source 1..36: mol_type = unassigned DNA; note = uncultivated organism sequence
gtttagaacccaaataaaatttctactgttgtagat

SEQ ID NO: 3629 - DNA, 36 bp, unidentified; identical to SEQ ID NO: 3628
  misc_feature 1..36: note = Category: MG31 effectors repeat
  misc_feature 1..36: note = Description: MG31-18 effector repeat
  source 1..36: mol_type = unassigned DNA; note = uncultivated organism sequence

SEQ ID NO: 3630 - DNA, 36 bp, unidentified; identical to SEQ ID NO: 3628
  misc_feature 1..36: note = Category: MG31 effectors repeat
  misc_feature 1..36: note = Description: MG31-18 effector repeat
  source 1..36: mol_type = unassigned DNA; note = uncultivated organism sequence

SEQ ID NO: 3631 - DNA, 36 bp, unidentified; identical to SEQ ID NO: 3628
  misc_feature 1..36: note = Category: MG31 effectors repeat
  misc_feature 1..36: note = Description: MG31-19 effector repeat
  source 1..36: mol_type = unassigned DNA; note = uncultivated organism sequence

SEQ ID NO: 3632 - DNA, 36 bp, unidentified; identical to SEQ ID NO: 3628
  misc_feature 1..36: note = Category: MG31 effectors repeat
  misc_feature 1..36: note = Description: MG31-17, MG31-18, MG31-19 effectors repeat
  source 1..36: mol_type = unassigned DNA; note = uncultivated organism sequence

SEQ ID NO: 3633 - DNA, 36 bp, unidentified
  misc_feature 1..36: note = Category: MG32 effectors repeat
  misc_feature 1..36: note = Description: MG32-1 effector repeat
  source 1..36: mol_type = unassigned DNA; note = uncultivated organism sequence
ctttaagagactccttcaatttctactgttgtagat

SEQ ID NO: 3634 - DNA, 36 bp, unidentified; identical to SEQ ID NO: 3633
  misc_feature 1..36: note = Category: MG32 effectors repeat
  misc_feature 1..36: note = Description: MG32-1 effector repeat
  source 1..36: mol_type = unassigned DNA; note = uncultivated organism sequence

SEQ ID NO: 3635 - RNA, 36 nt, synthetic construct
  misc_feature 1..36: note = Category: MG37 effectors repeat
  misc_feature 1..36: note = Description: MG37-1 repeat
  source 1..36: mol_type = other RNA
ggcgcgctggccagcgcgctcatgatcgactgacac

SEQ ID NO: 3636 - RNA, 115 nt, synthetic construct
  misc_feature 1..115: note = Category: MG37 sgRNA1
  misc_feature 1..115: note = Description: MG37-1 sgRNA1
  variation 92..115: note = any nucleotide
  source 1..115: mol_type = other RNA
tcgcctaaagggcgaaatgatctgcgttcagtgtcgtcgccttcaatgtgcgcatcaccgcagaggtcgatcagaaatgatcgactgacacnnnnnnnnnnnnnnnnnnnnnnnn

SEQ ID NO: 3637 - RNA, 93 nt, synthetic construct
  misc_feature 1..93: note = Category: MG37 sgRNA2
  misc_feature 1..93: note = Description: MG37-1 sgRNA2
  variation 70..93: note = any nucleotide
  source 1..93: mol_type = other RNA
tcgcctaaagggcgaaatgatctgcgttcagtgtcgtcgccttcaatgtgcgcatcaccgcagagacacnnnnnnnnnnnnnnnnnnnnnnnn

SEQ ID NO: 3638 - RNA, 73 nt, synthetic construct
  misc_feature 1..73: note = Category: MG37 tracrRNA
  misc_feature 1..73: note = Description: MG37-1 tracrRNA
  source 1..73: mol_type = other RNA
tcgcctaaagggcgaaatgatctgcgttcagtgtcgtcgccttcaatgtgcgcatcaccgcagaggtcgatca

SEQ ID NO: 3639 - RNA, 36 nt, synthetic construct
  misc_feature 1..36: note = Category: MG37 repeat
  variation 1..36: note = Description: MG37-2 repeat
  source 1..36: mol_type = other RNA
ccagaagcgagcgtggcattgcgaggtgacggacac

SEQ ID NO: 3640 - RNA, 111 nt, synthetic construct
  misc_feature 1..111: note = Category: MG37 sgRNA1
  misc_feature 1..111: note = Description: MG37-2 sgRNA1
  variation 88..111: note = any nucleotide
  source 1..111: mol_type = other RNA
ttcctcgacaggaggaaacaacgctgcggaacgtgtcgtcccctttaatgggcttggtaccgcaggtcaccgaaaggtgacggacacnnnnnnnnnnnnnnnnnnnnnnnn

SEQ ID NO: 3641 - RNA, 95 nt, synthetic construct
  misc_feature 1..95: note = Category: MG37 sgRNA2
  misc_feature 1..95: note = Description: MG37-2 sgRNA2
  variation 72..95: note = any nucleotide
  source 1..95: mol_type = other RNA
ttcctcgacaggaggaaacaacgctgcggaacgtgtcgtcccctttaatgggcttggtaccgcagggacacnnnnnnnnnnnnnnnnnnnnnnnn

SEQ ID NO: 3642 - RNA, 71 nt, synthetic construct
  misc_feature 1..71: note = Category: MG37 tracrRNA
  misc_feature 1..71: note = Description: MG37-2 tracrRNA
  source 1..71: mol_type = other RNA
ttcctcgacaggaggaaacaacgctgcggaacgtgtcgtcccctttaatgggcttggtaccgcaggtcacc

SEQ ID NO: 3643 - RNA, 37 nt, synthetic construct
  misc_feature 1..37: note = Category: MG37 repeat
  misc_feature 1..37: note = Description: MG37-3 repeat
  source 1..37: mol_type = other RNA
cctcgccgacggtgaaaggaaccagatctgctgacac

SEQ ID NO: 3644 - RNA, 116 nt, synthetic construct
  misc_feature 1..116: note = Category: MG37 sgRNA1
  misc_feature 1..116: note = Description: MG37-3 sgRNA1
  variation 93..116: note = any nucleotide
  source 1..116: mol_type = other RNA
aataaaatggtcctacaggggctgaaatcgcgcgggtgtgtcatcggcttcaatgcctttagcaccgcgagcagatgaaaatctgctgacacnnnnnnnnnnnnnnnnnnnnnnnn

SEQ ID NO: 3645 - RNA, 98 nt, synthetic construct
  misc_feature 1..98: note = Category: MG37 sgRNA2
  misc_feature 1..98: note = Description: MG37-3 sgRNA2
  variation 75..98: note = any nucleotide
  source 1..98: mol_type = other RNA
aataaaatggtcctacaggggctgaaatcgcgcgggtgtgtcatcggcttcaatgcctttagcaccgcggacacnnnnnnnnnnnnnnnnnnnnnnnn

SEQ ID NO: 3646 - RNA, 76 nt, synthetic construct
  misc_feature 1..76: note = Category: MG37 tracrRNA
  misc_feature 1..76: note = Description: MG37-3 tracrRNA
  source 1..76: mol_type = other RNA
aataaaatggtcctacaggggctgaaatcgcgcgggtgtgtcatcggcttcaatgcctttagcaccgcgagcagat

SEQ ID NO: 3647 - RNA, 36 nt, synthetic construct
  misc_feature 1..36: note = Category: MG37 repeat
  misc_feature 1..36: note = Description: MG37-4 repeat
  source 1..36: mol_type = other RNA
ggcggcgaattcgccggcatctcgatcgaccgacac

SEQ ID NO: 3648 - RNA, 131 nt, synthetic construct
  misc_feature 1..131: note = Category: MG37 sgRNA1
  misc_feature 1..131: note = Description: MG37-4 sgRNA1
  variation 108..131: note = any nucleotide
  source 1..131: mol_type = other RNA
tatattgaaagcaatccgctacaggcggagggaactccgtgaacgtgtcttccccttcgatgggcttggcacacggggtcaatcgaggaaactcgatcgaccgacacnnnnnnnnnnnnnnnnnnnnnnnn

SEQ ID NO: 3649 - RNA, 105 nt, synthetic construct
  misc_feature 1..105: note = Category: MG37 sgRNA2
  misc_feature 1..105: note = Description: MG37-4 sgRNA2
  variation 82..105: note = any nucleotide
  source 1..105: mol_type = other RNA
tatattgaaagcaatccgctacaggcggagggaactccgtgaacgtgtcttccccttcgatgggcttggcacacgggacacnnnnnnnnnnnnnnnnnnnnnnnn

SEQ ID NO: 3650 - RNA, 87 nt, synthetic construct
  misc_feature 1..87: note = Category: MG37 tracrRNA
  misc_feature 1..87: note = Description: MG37-4 tracrRNA
  source 1..87: mol_type = other RNA
tatattgaaagcaatccgctacaggcggagggaactccgtgaacgtgtcttccccttcgatgggcttggcacacggggtcaatcgag

SEQ ID NO: 3651 - RNA, 36 nt, synthetic construct
  misc_feature 1..36: note = Category: MG37 repeat1
  misc_feature 1..36: note = Description: MG37-5 repeat1
  source 1..36: mol_type = other RNA
gtatcaccggttgaagcacacctcattgatggacac

SEQ ID NO: 3652 - RNA, 120 nt, synthetic construct
  misc_feature 1..120: note = Category: MG37 sgRNA1
  misc_feature 1..120: note = Description: MG37-5 sgRNA1
  variation 97..120: note = any nucleotide
  source 1..120: mol_type = other RNA
taataagaagctcctatagggagtgtattttttacggaatgtgtcttcctattaaattagtttagcaccgtaacattaatgaaaattgatggacacnnnnnnnnnnnnnnnnnnnnnnnn

SEQ ID NO: 3653 - RNA, 102 nt, synthetic construct
  misc_feature 1..102: note = Category: MG37 sgRNA2
  misc_feature 1..102: note = Description: MG37-5 sgRNA2
  variation 79..102: note = any nucleotide
  source 1..102: mol_type = other RNA
taataagaagctcctatagggagtgtattttttacggaatgtgtcttcctattaaattagtttagcaccgtaagacacnnnnnnnnnnnnnnnnnnnnnnnn

SEQ ID NO: 3654 - RNA, 80 nt, synthetic construct
  misc_feature 1..80: note = Category: MG37 tracrRNA1
  misc_feature 1..80: note = Description: MG37-5 tracrRNA1
  source 1..80: mol_type = other RNA
taataagaagctcctatagggagtgtattttttacggaatgtgtcttcctattaaattagtttagcaccgtaacattaat

SEQ ID NO: 3655 - RNA, 36 nt, synthetic construct
  misc_feature 1..36: note = Category: MG37 repeat
  misc_feature 1..36: note = Description: MG37-6 repeat
  source 1..36: mol_type = other RNA
gtcgcatcgcttccgagaaaccaacgctgttggcac

SEQ ID NO: 3656 - RNA, 110 nt, synthetic construct
  misc_feature 1..110: note = Category: MG37 sgRNA1
  misc_feature 1..110: note = Description: MG37-6 sgRNA1
  source 1..110: mol_type = other RNA
  variation 87..110: note = any nucleotide
aaggacgtcgaaatcgatgtcgctctgtggtatgtgcctccgtcttaaatgactttaagccacaggacagcgaaagctgttggcacnnnnnnnnnnnnnnnnnnnnnnnn

SEQ ID NO: 3657 - RNA, 94 nt, synthetic construct
  misc_feature 1..94: note = Category: MG37 sgRNA2
  misc_feature 1..94: note = Description: MG37-6 sgRNA2
  source 1..94: mol_type = other RNA
  variation 71..94: note = any nucleotide
aaggacgtcgaaatcgatgtcgctctgtggtatgtgcctccgtcttaaatgactttaagccacagggcacnnnnnnnnnnnnnnnnnnnnnnnn

SEQ ID NO: 3658 - RNA, 71 nt, synthetic construct
  misc_feature 1..71: note = Category: MG37 tracrRNA
  misc_feature 1..71: note = Description: MG37-6 tracrRNA
  source 1..71: mol_type = other RNA
aaggacgtcgaaatcgatgtcgctctgtggtatgtgcctccgtcttaaatgactttaagccacaggacagc

SEQ ID NO: 3659 - RNA, 36 nt, synthetic construct
  misc_feature 1..36: note = Category: MG37 repeat
  misc_feature 1..36: note = Description: MG37-7 repeat
  source 1..36: mol_type = other RNA
ggagcatcgagcaacccgaacttcatctactgacac

SEQ ID NO: 3660 - RNA, 126 nt, synthetic construct
  misc_feature 1..126: note = Category: MG37 sgRNA1
  misc_feature 1..126: note = Description: MG37-7 sgRNA1
  variation 103..126: note = any nucleotide
  source 1..126: mol_type = other RNA
attatcaatgtatcctacaggggtacggaattacgcggcatgtgtcgtcgccttcaatggccttggcaccgcgtggtagaatgagaaatcatctactgacacnnnnnnnnnnnnnnnnnnnnnnnn

SEQ ID NO: 3661 - RNA, 104 nt, synthetic construct
  misc_feature 1..104: note = Category: MG37 sgRNA2
  misc_feature 1..104: note = Description: MG37-7 sgRNA2
  variation 81..104: note = any nucleotide
  source 1..104: mol_type = other RNA
attatcaatgtatcctacaggggtacggaattacgcggcatgtgtcgtcgccttcaatggccttggcaccgcgtggacacnnnnnnnnnnnnnnnnnnnnnnnn

SEQ ID NO: 3662 - RNA, 84 nt, synthetic construct
  misc_feature 1..84: note = Category: MG37 tracrRNA
  misc_feature 1..84: note = Description: MG37-7 tracrRNA
  source 1..84: mol_type = other RNA
attatcaatgtatcctacaggggtacggaattacgcggcatgtgtcgtcgccttcaatggccttggcaccgcgtggtagaatga

SEQ ID NO: 3663 - RNA, 37 nt, synthetic construct
  misc_feature 1..37: note = Category: MG53 repeat
  misc_feature 1..37: note = Description: MG53-1 repeat
  source 1..37: mol_type = other RNA
cataacgcccagaagaggacctgatcgcaccggacac

SEQ ID NO: 3664 - RNA, 205 nt, synthetic construct
  misc_feature 1..205: note = Category: MG53 sgRNA1
  misc_feature 1..205: note = Description: MG53-1 sgRNA1
  variation 182..205: note = any nucleotide
  source 1..205: mol_type = other RNA
ttcgggcctgggttccgtctataggtcgggactcacgctgagaatgtgtctcgccggaatgtggctgcgggcgacccccgcaactgggctcggcgcgggcaaccgcgacgaggctatggcgtctcagcgggtgcgttcagtttctcttctgaaaagaagaggacctgatcgcaccggacacnnnnnnnnnnnnnnnnnnnnnnnn

SEQ ID NO: 3665 - RNA, 175 nt, synthetic construct
  misc_feature 1..175: note = Category: MG53 sgRNA2
  misc_feature 1..175: note = Description: MG53-1 sgRNA2
  variation 152..175: note = any nucleotide
  source 1..175: mol_type = other RNA
ttcgggcctgggttccgtctataggtcgggactcacgctgagaatgtgtctcgccggaatgtggctgcgggcgacccccgcaactgggctcggcgcgggcaaccgcgacgaggctatggcgtctcagcgggtgcggaaacgcaccggacacnnnnnnnnnnnnnnnnnnnnnnnn

SEQ ID NO: 3666 - RNA, 210 nt, synthetic construct
  misc_feature 1..210: note = Category: MG53 sgRNA3
  misc_feature 1..210: note = Description: MG53-1 sgRNA3
  variation 187..210: note = any nucleotide
  source 1..210: mol_type = other RNA
ttcggccgccgtaggttcatattcgtactgtggccttcgggcctgggttccgtctataggtcgggactcacgctgagaatgtgtctcgccggaatgtggctgcgggcgacccccgcaactgggctcggcgcgggcaaccgcgacgaggctatggcgtctcagcgggtgcggaaacgcaccggacacnnnnnnnnnnnnnnnnnnnnnnnn

SEQ ID NO: 3667 - RNA, 240 nt, synthetic construct
  misc_feature 1..240: note = Category: MG53 sgRNA4
  misc_feature 1..240: note = Description: MG53-1 sgRNA4
  variation 217..240: note = any nucleotide
  source 1..240: mol_type = other RNA
ttcggccgccgtaggttcatattcgtactgtggccttcgggcctgggttccgtctataggtcgggactcacgctgagaatgtgtctcgccggaatgtggctgcgggcgacccccgcaactgggctcggcgcgggcaaccgcgacgaggctatggcgtctcagcgggtgcgttcagtttctcttctgaaaagaagaggacctgatcgcaccggacacnnnnnnnnnnnnnnnnnnnnnnnn

SEQ ID NO: 3668 - RNA, 150 nt, synthetic construct
  misc_feature 1..150: note = Category: MG53 tracrRNA1
  misc_feature 1..150: note = Description: MG53-1 tracrRNA1
  source 1..150: mol_type = other RNA
ttcgggcctgggttccgtctataggtcgggactcacgctgagaatgtgtctcgccggaatgtggctgcgggcgacccccgcaactgggctcggcgcgggcaaccgcgacgaggctatggcgtctcagcgggtgcgttcagtttctcttct

SEQ ID NO: 3669 - RNA, 228 nt, synthetic construct
  misc_feature 1..228: note = Category: MG53 tracrRNA2
  misc_feature 1..228: note = Description: MG53-1 tracrRNA2
  source 1..228: mol_type = other RNA
gccacacgggcaatacggggctttgctcgcagaccccttgactttcggccgccgtaggttcatattcgtactgtggccttcgggcctgggttccgtctataggtcgggactcacgctgagaatgtgtctcgccggaatgtggctgcgggcgacccccgcaactgggctcggcgcgggcaaccgcgacgaggctatggcgtctcagcgggtgcgttcagtttctcttct

SEQ ID NO: 3670 - RNA, 36 nt, synthetic construct
  misc_feature 1..36: note = Category: MG54 repeat
  misc_feature 1..36: note = Description: MG54-1 repeat
  source 1..36: mol_type = other RNA
gccgcgtcccccgacgcgaccctgatcgatggacac

SEQ ID NO: 3671 - RNA, 172 nt, synthetic construct
  misc_feature 1..172: note = Category: MG54 sgRNA1
  misc_feature 1..172: note = Description: MG54-1 sgRNA1
  variation 149..172: note = any nucleotide
  source 1..172: mol_type = other RNA
cgggcagccacgcagccgtcgttcctgagtgtcaacacgtgctggccctaaggcgctcgcgccgatggggacccgacaacggcggggcgacccgcccgcggcggcacggacggcgacggcatcgatcaggaaactgatcgatggacacnnnnnnnnnnnnnnnnnnnnnnnn

SEQ ID NO: 3672 - RNA, 217 nt, synthetic construct
  misc_feature 1..217: note = Category: MG54 sgRNA2
  misc_feature 1..217: note = Description: MG54-1 sgRNA2
  variation 194..217: note = any nucleotide
  source 1..217: mol_type = other RNA
gcatcggcggggtcgcgtccgcccgcccagcggctataggcaggccgggcagccacgcagccgtcgttcctgagtgtcaacacgtgctggccctaaggcgctcgcgccgatggggacccgacaacggcggggcgacccgcccgcggcggcacggacggcgacggcatcgatcaggaaactgatcgatggacacnnnnnnnnnnnnnnnnnnnnnnnn

SEQ ID NO: 3673 - RNA, 145 nt, synthetic construct
  misc_feature 1..145: note = Category: MG54 tracrRNA1
  misc_feature 1..145: note = Description: MG54-1 tracrRNA1
  source 1..145: mol_type = other RNA
cgggcagccacgcagccgtcgttcctgagtgtcaacacgtgctggccctaaggcgctcgcgccgatggggacccgacaacggcggggcgacccgcccgcggcggcacggacggcgacggcatcgatcagcttcgcgtcggcccgg

SEQ ID NO: 3674 - RNA, 129 nt, synthetic construct
  misc_feature 1..129: note = Category: MG54 tracrRNA2
  misc_feature 1..129: note = Description: MG54-1 tracrRNA2
  source 1..129: mol_type = other RNA
cgggcagccacgcagccgtcgttcctgagtgtcaacacgtgctggccctaaggcgctcgcgccgatggggacccgacaacggcggggcgacccgcccgcggcggcacggacggcgacggcatcgatcag

SEQ ID NO: 3675 - RNA, 108 nt, synthetic construct
  misc_feature 1..108: note = Category: MG54 tracrRNA3
  misc_feature 1..108: note = Description: MG54-1 tracrRNA3
  source 1..108: mol_type = other RNA
ttcctgagtgtcaacacgtgctggccctaaggcgctcgcgccgatggggacccgacaacggcggggcgacccgcccgcggcggcacggacggcgacggcatcgatcag

SEQ ID NO: 3676 - RNA, 215 nt, synthetic construct
  misc_feature 1..215: note = Category: MG54 tracrRNA4
  misc_feature 1..215: note = Description: MG54-1 tracrRNA4
  source 1..215: mol_type = other RNA
ttccgtggtatactgcactcgtggagcatcggcggggtcgcgtccgcccgcccagcggctataggcaggccgggcagccacgcagccgtcgttcctgagtgtcaacacgtgctggccctaaggcgctcgcgccgatggggacccgacaacggcggggcgacccgcccgcggcggcacggacggcgacggcatcgatcagcttcgcgtcggcccgg

SEQ ID NO: 3677 - skipped

SEQ ID NO: 3678 - RNA, 44 nt, synthetic construct
  misc_feature 1..44: note = Category: MG56 effectors crRNA
  misc_feature 1..44: note = Description: MG56-1, MG56-2 effectors crRNA
  misc_difference 21..44: note = any nucleotide
  source 1..44: mol_type = other RNA
aaatttctacttttgtagatnnnnnnnnnnnnnnnnnnnnnnnn

SEQ ID NO: 3679 - DNA, 36 bp, unidentified
  misc_feature 1..36: note = Category: MG56 effectors repeat
  misc_feature 1..36: note = Description: MG56-1 effector repeat
  source 1..36: mol_type = unassigned DNA; note = uncultivated organism sequence
ctcaaatagacctatcaaatttctacttttgtagat

SEQ ID NO: 3680 - DNA, 36 bp, unidentified; identical to SEQ ID NO: 3679
  misc_feature 1..36: note = Category: MG56 effectors repeat
  misc_feature 1..36: note = Description: MG56-1, MG60-8 effectors repeat
  source 1..36: mol_type = unassigned DNA; note = uncultivated organism sequence

SEQ ID NO: 3681 - DNA, 36 bp, unidentified
  misc_feature 1..36: note = Category: MG57 effectors repeat
  misc_feature 1..36: note = Description: MG57-3 effector repeat
  source 1..36: mol_type = unassigned DNA; note = uncultivated organism sequence
gtttgaatttcatactaaatttctactgttgtagat

SEQ ID NO: 3682 - DNA, 36 bp, unidentified
  misc_feature 1..36: note = Category: MG57 effectors repeat
  misc_feature 1..36: note = Description: MG57-7 effector repeat
  source 1..36: mol_type = unassigned DNA; note = uncultivated organism sequence
ctctaaataacaaataaaatttctactattgtagat

SEQ ID NO: 3683 - DNA, 36 bp, unidentified; identical to SEQ ID NO: 3682
  misc_feature 1..36: note = Category: MG57 effectors repeat
  misc_feature 1..36: note = Description: MG57-7 effector repeat
  source 1..36: mol_type = unassigned DNA; note = uncultivated organism sequence

SEQ ID NO: 3684 - DNA, 36 bp, unidentified; identical to SEQ ID NO: 3682
  misc_feature 1..36: note = Category: MG57 effectors repeat
  misc_feature 1..36: note = Description: MG57-7 effector repeat
  source 1..36: mol_type = unassigned DNA; note = uncultivated organism sequence

SEQ ID NO: 3685 - DNA, 36 bp, unidentified; identical to SEQ ID NO: 3682
  misc_feature 1..36: note = Category: MG57 effectors repeat
  misc_feature 1..36: note = Description: MG57-7 effector repeat
  source 1..36: mol_type = unassigned DNA; note = uncultivated organism sequence

SEQ ID NO: 3686 - DNA, 36 bp, unidentified
  misc_feature 1..36: note = Category: MG57 effectors repeat
  misc_feature 1..36: note = Description: MG57-13 effector repeat
  source 1..36: mol_type = unassigned DNA; note = uncultivated organism sequence
gtctaaaaggcttagacaatttctactattgtagat

SEQ ID NO: 3687 - DNA, 36 bp, unidentified
  misc_feature 1..36: note = Category: MG57 effectors repeat
  misc_feature 1..36: note = Description: MG57-14 effector repeat
  source 1..36: mol_type = unassigned DNA; note = uncultivated organism sequence
ggctacaagccatattaaatttctactattgtagat

SEQ ID NO: 3688 - DNA, 36 bp, unidentified; identical to SEQ ID NO: 3687
  misc_feature 1..36: note = Category: MG57 effectors repeat
  misc_feature 1..36: note = Description: MG57-14 effector repeat
  source 1..36: mol_type = unassigned DNA; note = uncultivated organism sequence

SEQ ID NO: 3689 - DNA, 36 bp, unidentified; identical to SEQ ID NO: 3687
  misc_feature 1..36: note = Category: MG57 effectors repeat
  misc_feature 1..36: note = Description: MG57-14 effector repeat
  source 1..36: mol_type = unassigned DNA; note = uncultivated organism sequence

SEQ ID NO: 3690 - DNA, 23 bp, unidentified
  misc_feature 1..23: note = Category: MG57 effectors repeat
  misc_feature 1..23: note = Description: MG57-15 effector repeat
  source 1..23: mol_type = unassigned DNA; note = uncultivated organism sequence
acaaaatttctactattgtagat

SEQ ID NO: 3691 - DNA, 23 bp, unidentified
  misc_feature 1..23: note = Category: MG57 effectors repeat
  misc_feature 1..23: note = Description: MG57-15 effector repeat
  source 1..23: mol_type = unassigned DNA; note = uncultivated organism sequence
acaaaatttctactattgtagat

SEQ ID NO: 3692 - DNA, 23 bp, unidentified
  misc_feature 1..23: note = Category: MG57 effectors repeat
  misc_feature 1..23: note = Description: MG57-15 effector repeat
  source 1..23: mol_type = unassigned DNA; note = uncultivated organism sequence
acaaaatttctactattgtagat

SEQ ID NO: 3693 - DNA, 23 bp, unidentified
  misc_feature 1..23: note = Category: MG57 effectors repeat
  misc_feature 1..23: note = Description: MG57-15 effector repeat
  source 1..23: mol_type = unassigned DNA; note = uncultivated organism sequence
acaaaatttctactattgtagat

SEQ ID NO: 3694 - DNA, 23 bp, unidentified
  misc_feature 1..23: note = Category: MG57 effectors repeat
  misc_feature 1..23: note = Description: MG57-15 effector repeat
  source 1..23: mol_type = unassigned DNA; note = uncultivated organism sequence
acaaaatttctactattgtagat

SEQ ID NO: 3695 - DNA, 43 bp, synthetic construct
  misc_feature 1..43: note = Category: MG57 guide RNA
  misc_feature 1..43: note = Description: MG57-1 sgRNA
  misc_difference 20..43: note = any nucleotide
  source 1..43: mol_type = other DNA
aatttctactatcgtagatnnnnnnnnnnnnnnnnnnnnnnnn

SEQ ID NO: 3696 - DNA, 44 bp, synthetic construct
  misc_feature 1..44: note = Category: MG57 guide RNA
  misc_feature 1..44: note = Description: MG57-2 sgRNA
  misc_difference 21..44: note = any nucleotide
  source 1..44: mol_type = other DNA
aatttctactagtgtagattnnnnnnnnnnnnnnnnnnnnnnnn

SEQ ID NO: 3697 - DNA, 36 bp, unidentified
  misc_feature 1..36: note = Category: MG58 effectors repeat
  misc_feature 1..36: note = Description: MG58-1 effector repeat
  source 1..36: mol_type = unassigned DNA; note = uncultivated organism sequence
gtttagaaattatataagatttctacttttgtagat

SEQ ID NO: 3698 - DNA, 36 bp, unidentified; identical to SEQ ID NO: 3697
  misc_feature 1..36: note = Category: MG58 effectors repeat
  misc_feature 1..36: note = Description: MG58-1, MG58-6, MG60-1 effectors repeat
  source 1..36: mol_type = unassigned DNA; note = uncultivated organism sequence

SEQ ID NO: 3699 - DNA, 36 bp, unidentified
  misc_feature 1..36: note = Category: MG58 effectors repeat
  misc_feature 1..36: note = Description: MG58-2 effector repeat
  source 1..36: mol_type = unassigned DNA; note = uncultivated organism sequence
atcaattactagtttccaatttctacttttgtagat

SEQ ID NO: 3700 - DNA, 36 bp, unidentified
  misc_feature 1..36: note = Category: MG58 effectors repeat
  misc_feature 1..36: note = Description: MG58-3 effector repeat
  source 1..36: mol_type = unassigned DNA; note = uncultivated organism sequence
gtttagaacttatataagatttctacttttgtagat

SEQ ID NO: 3701 - DNA, 36 bp, unidentified; identical to SEQ ID NO: 3700
  misc_feature 1..36: note = Category: MG58 effectors repeat
  misc_feature 1..36: note = Description: MG58-3, MG58-7 effectors repeat
  source 1..36: mol_type = unassigned DNA; note = uncultivated organism sequence

SEQ ID NO: 3702 - DNA, 36 bp, unidentified
  misc_feature 1..36: note = Category: MG58 effectors repeat
  misc_feature 1..36: note = Description: MG58-4 effector repeat
  source 1..36: mol_type = unassigned DNA; note = uncultivated organism sequence
gtttagaagttatataagatttctacttttgtagat

SEQ ID NO: 3703 - DNA, 36 bp, unidentified; identical to SEQ ID NO: 3702
  misc_feature 1..36: note = Category: MG58 effectors repeat
  misc_feature 1..36: note = Description: MG58-4, MG58-11, MG60-7 effectors repeat
  source 1..36: mol_type = unassigned DNA; note = uncultivated organism sequence

SEQ ID NO: 3704 - DNA, 36 bp, unidentified; identical to SEQ ID NO: 3697
  misc_feature 1..36: note = Category: MG58 effectors repeat
  misc_feature 1..36: note = Description: MG58-6 effector repeat
  source 1..36: mol_type = unassigned DNA; note = uncultivated organism sequence

SEQ ID NO: 3705 - DNA, 36 bp, unidentified; identical to SEQ ID NO: 3700
  misc_feature 1..36: note = Category: MG58 effectors repeat
  misc_feature 1..36: note = Description: MG58-7 effector repeat
  source 1..36: mol_type = unassigned DNA; note = uncultivated organism sequence

SEQ ID NO: 3706 - DNA, 36 bp, unidentified
  misc_feature 1..36: note = Category: MG58 effectors repeat
  misc_feature 1..36: note = Description: MG58-10 effector repeat
  source 1..36: mol_type = unassigned DNA; note = uncultivated organism sequence
gtttagaagttatataagatttctacttctgtagat

SEQ ID NO: 3707 - DNA, 36 bp, unidentified; identical to SEQ ID NO: 3706
  misc_feature 1..36: note = Category: MG58 effectors repeat
  misc_feature 1..36: note = Description: MG58-10 effector repeat
  source 1..36: mol_type = unassigned DNA; note = uncultivated organism sequence

SEQ ID NO: 3708 - DNA, 36 bp, unidentified; identical to SEQ ID NO: 3702
  misc_feature 1..36: note = Category: MG58 effectors repeat
  misc_feature 1..36: note = Description: MG58-11 effector repeat
  source 1..36: mol_type = unassigned DNA; note = uncultivated organism sequence

SEQ ID NO: 3709 - DNA, 36 bp, unidentified
  misc_feature 1..36: note = Category: MG58 effectors repeat
  misc_feature 1..36: note = Description: MG58-12 effector repeat
  source 1..36: mol_type = unassigned DNA; note = uncultivated organism sequence
gtttagaaactatataagatttctacttttgtagat

SEQ ID NO: 3710 - DNA, 36 bp, unidentified; identical to SEQ ID NO: 3709
  misc_feature 1..36: note = Category: MG58 effectors repeat
  misc_feature 1..36: note = Description: MG58-12, MG58-13 effectors repeat
  source 1..36: mol_type = unassigned DNA; note = uncultivated organism sequence

SEQ ID NO: 3711 - DNA, 36 bp, unidentified; identical to SEQ ID NO: 3709
  misc_feature 1..36: note = Category: MG58 effectors repeat
  misc_feature 1..36: note = Description: MG58-13 effector repeat
  source 1..36: mol_type = unassigned DNA; note = uncultivated organism sequence

SEQ ID NO: 3712 - DNA, 36 bp, unidentified
  misc_feature 1..36: note = Category: MG59 effectors repeat
  misc_feature 1..36: note = Description: MG59-1 effector repeat
  source 1..36: mol_type = unassigned DNA; note = uncultivated organism sequence
gtcaaacactccgccacaatttctactgtcgtagat

SEQ ID NO: 3713 - DNA, 36 bp, unidentified; identical to SEQ ID NO: 3712
  misc_feature 1..36: note = Category: MG59 effectors repeat
  misc_feature 1..36: note = Description: MG59-1 effector repeat
  source 1..36: mol_type = unassigned DNA; note = uncultivated organism sequence

SEQ ID NO: 3714 - DNA, 36 bp, unidentified; identical to SEQ ID NO: 3712
  misc_feature 1..36: note = Category: MG59 effectors repeat
  misc_feature 1..36: note = Description: MG59-1 effector repeat
  source 1..36: mol_type = unassigned DNA; note = uncultivated organism sequence

SEQ ID NO: 3715 - DNA, 32 bp, unidentified
  misc_feature 1..32: note = Category: MG59 effectors repeat
  misc_feature 1..32: note = Description: MG59-2 effector repeat
  source 1..32: mol_type = unassigned DNA; note = uncultivated organism sequence
agggcccctcataaatttctactgttgtagat

SEQ ID NO: 3716 - DNA, 32 bp, unidentified; identical to SEQ ID NO: 3715
  misc_feature 1..32: note = Category: MG59 effectors repeat
  misc_feature 1..32: note = Description: MG59-2 effector repeat
  source 1..32: mol_type = unassigned DNA; note = uncultivated organism sequence

SEQ ID NO: 3717 - DNA, 36 bp, unidentified
  misc_feature 1..36: note = Category: MG59 effectors repeat
  misc_feature 1..36: note = Description: MG59-3 effector repeat
  source 1..36: mol_type = unassigned DNA; note = uncultivated organism sequence
gtttccccacgtggttaaatttctacttttgtagat

SEQ ID NO: 3718 - DNA, 36 bp, unidentified; identical to SEQ ID NO: 3717
  misc_feature 1..36: note = Category: MG59 effectors repeat
  misc_feature 1..36: note = Description: MG59-3 effector repeat
  source 1..36: mol_type = unassigned DNA; note = uncultivated organism sequence

SEQ ID NO: 3719 - DNA, 29 bp, unidentified
  misc_feature 1..29: note = Category: MG59 effectors repeat
  misc_feature 1..29: note = Description: MG59-4 effector repeat
  source 1..29: mol_type = unassigned DNA; note = uncultivated organism sequence
cacgtggtttaatttctacttttgtagat

SEQ ID NO: 3720 - DNA, 20 bp, unidentified
  misc_feature 1..20: note = Category: MG59 effectors repeat
  misc_feature 1..20: note = Description: MG59-5 effector repeat
  source 1..20: mol_type = unassigned DNA; note = uncultivated organism sequence
aaatctctactgtcgtagag

SEQ ID NO: 3721 - DNA, 20 bp, unidentified
  misc_feature 1..20: note = Category: MG59 effectors repeat
  misc_feature 1..20: note = Description: MG59-5 effector repeat
  source 1..20: mol_type = unassigned DNA; note = uncultivated organism sequence
aaatctctactgtcgtagag

SEQ ID NO: 3722 - DNA, 20 bp, unidentified
  misc_feature 1..20: note = Category: MG59 effectors repeat
  misc_feature 1..20: note = Description: MG59-5 effector repeat
  source 1..20: mol_type = unassigned DNA; note = uncultivated organism sequence
aaatctctactgtcgtagag

SEQ ID NO: 3723 - DNA, 19 bp, unidentified
  misc_feature 1..19: note = Category: MG59 effectors repeat
  misc_feature 1..19: note = Description: MG59-6 effector repeat
  source 1..19: mol_type = unassigned DNA; note = uncultivated organism sequence
aatttctactgttgtagat

SEQ ID NO: 3724 - DNA, 36 bp, unidentified
  misc_feature 1..36: note = Category: MG59 effectors repeat
  misc_feature 1..36: note = Description: MG59-7 effector repeat
  source 1..36: mol_type = unassigned DNA; note = uncultivated organism sequence
gttttgcaatcttccctaatttctactgttgtagat

SEQ ID NO: 3725 - DNA, 36 bp, unidentified; identical to SEQ ID NO: 3724
  misc_feature 1..36: note = Category: MG59 effectors repeat
  misc_feature 1..36: note = Description: MG59-7, MG59-9 effectors repeat
  source 1..36: mol_type = unassigned DNA; note = uncultivated organism sequence

SEQ ID NO: 3726 - DNA, 36 bp, unidentified
  misc_feature 1..36: note = Category: MG59 effectors repeat
  misc_feature 1..36: note = Description: MG59-8 effector repeat
  source 1..36: mol_type = unassigned DNA; note = uncultivated organism sequence
cttttgcaatcttccctaatttctactgttgtagat

SEQ ID NO: 3727 - DNA, 36 bp, unidentified; identical to SEQ ID NO: 3726
  misc_feature 1..36: note = Category: MG59 effectors repeat
  misc_feature 1..36: note = Description: MG59-8 effector repeat
  source 1..36: mol_type = unassigned DNA; note = uncultivated organism sequence

SEQ ID NO: 3728 - DNA, 36 bp, unidentified; identical to SEQ ID NO: 3724
  misc_feature 1..36: note = Category: MG59 effectors repeat
  misc_feature 1..36: note = Description: MG59-9 effector repeat
  source 1..36: mol_type = unassigned DNA; note = uncultivated organism sequence

SEQ ID NO: 3729 - RNA, 43 nt, synthetic construct
  misc_feature 1..43: note = Category: MG59 guide RNA
  misc_feature 1..43: note = Description: MG59-1 sgRNA
  misc_difference 20..43: note = any nucleotide
  source 1..43: mol_type = other RNA
aatttctactgtcgtagatnnnnnnnnnnnnnnnnnnnnnnnn

SEQ ID NO: 3730 - RNA, 43 nt, synthetic construct
  misc_feature 1..43: note = Category: MG59 guide RNA
  misc_feature 1..43: note = Description: MG59-2 sgRNA
  misc_difference 20..43: note = any nucleotide
  source 1..43: mol_type = other RNA
aatttctactgttgtagatnnnnnnnnnnnnnnnnnnnnnnnn

SEQ ID NO: 3731 - DNA, 36 bp, unidentified
  misc_feature 1..36: note = Category: MG60 effectors repeat
  misc_feature 1..36: note = Description: MG60-3 effector repeat
  source 1..36: mol_type = unassigned DNA; note = uncultivated organism sequence
gtttaaacatagtatctaatttctactttggtagat

SEQ ID NO: 3732 - DNA, 36 bp, unidentified
  misc_feature 1..36: note = Category: MG60 effectors repeat
  misc_feature 1..36: note = Description: MG60-6 effector repeat
  source 1..36: mol_type = unassigned DNA; note = uncultivated organism sequence
gttgaaagaataaataaagtacctgctgttgcaggc

SEQ ID NO: 3733 - DNA, 36 bp, unidentified; identical to SEQ ID NO: 3702
  misc_feature 1..36: note = Category: MG60 effectors repeat
  misc_feature 1..36: note = Description: MG60-7 effector repeat
  source 1..36: mol_type = unassigned DNA; note = uncultivated organism sequence

SEQ ID NO: 3734 - RNA, 44 nt, synthetic construct
  misc_feature 1..44: note = Category: MG61 effectors crRNA
  misc_feature 1..44: note = Description: MG61-1 effector crRNA
  misc_difference 21..44: note = any nucleotide
  source 1..44: mol_type = other RNA
aaatacctgctattgcaggcnnnnnnnnnnnnnnnnnnnnnnnn

SEQ ID NO: 3735 - RNA, 43 nt, synthetic construct
  misc_feature 1..43: note = Category: MG61 effectors crRNA
  misc_feature 1..43: note = Description: MG61-2 effector crRNA
  source 1..43: mol_type = other RNA
  misc_difference 20..43: note = any nucleotide
aaatgcctgctggtgcaggnnnnnnnnnnnnnnnnnnnnnnnn

SEQ ID NO: 3736 - DNA, 36 bp, unidentified
  misc_feature 1..36: note = Category: MG61 effectors repeat
  misc_feature 1..36: note = Description: MG61-1 effector repeat
  source 1..36: mol_type = unassigned DNA; note = uncultivated organism sequence
ggtatataccatcaataaatacctgctattgcaggc

SEQ ID NO: 3737 - DNA, 36 bp, unidentified; identical to SEQ ID NO: 3736
  misc_feature 1..36: note = Category: MG61 effectors repeat
  misc_feature 1..36: note = Description: MG61-1 effector repeat
  source 1..36: mol_type = unassigned DNA; note = uncultivated organism sequence

SEQ ID NO: 3738 - DNA, 36 bp, unidentified; identical to SEQ ID NO: 3736
  misc_feature 1..36: note = Category: MG61 effectors repeat
  misc_feature 1..36: note = Description: MG61-1 effector repeat
  source 1..36: mol_type = unassigned DNA; note = uncultivated organism sequence

SEQ ID NO: 3739 - DNA, 36 bp, unidentified; identical to SEQ ID NO: 3736
  misc_feature 1..36: note = Category: MG61 effectors repeat
  misc_feature 1..36: note = Description: MG61-1 effector repeat
  source 1..36: mol_type = unassigned DNA; note = uncultivated organism sequence

SEQ ID NO: 3740 - DNA, 35 bp, unidentified
  misc_feature 1..35: note = Category: MG61 effectors repeat
  misc_feature 1..35: note = Description: MG61-2 effector repeat
  source 1..35: mol_type = unassigned DNA; note = uncultivated organism sequence
attataaggataatagaaatacctgctggtgcagg

SEQ ID NO: 3741 - DNA, 35 bp, unidentified; identical to SEQ ID NO: 3740
  misc_feature 1..35: note = Category: MG61 effectors repeat
  misc_feature 1..35: note = Description: MG61-2 effector repeat
  source 1..35: mol_type = unassigned DNA; note = uncultivated organism sequence

SEQ ID NO: 3742 - DNA, 35 bp, unidentified; identical to SEQ ID NO: 3740
  misc_feature 1..35: note = Category: MG61 effectors repeat
  misc_feature 1..35: note = Description: MG61-2 effector repeat
  source 1..35: mol_type = unassigned DNA; note = uncultivated organism sequence

SEQ ID NO: 3743 - DNA, 35 bp, unidentified; identical to SEQ ID NO: 3740
  misc_feature 1..35: note = Category: MG61 effectors repeat
  misc_feature 1..35: note = Description: MG61-2 effector repeat
  source 1..35: mol_type = unassigned DNA; note = uncultivated organism sequence

SEQ ID NO: 3744 - DNA, 35 bp, unidentified; identical to SEQ ID NO: 3740
  misc_feature 1..35: note = Category: MG61 effectors repeat
  misc_feature 1..35: note = Description: MG61-2 effector repeat
  source 1..35: mol_type = unassigned DNA; note = uncultivated organism sequence

SEQ ID NO: 3745 - DNA, 35 bp, unidentified; identical to SEQ ID NO: 3740
  misc_feature 1..35: note = Category: MG61 effectors repeat
  misc_feature 1..35: note = Description: MG61-2 effector repeat
  source 1..35: mol_type = unassigned DNA; note = uncultivated organism sequence

SEQ ID NO: 3746 - DNA, 35 bp, unidentified
  misc_feature 1..35: note = Category: MG61 effectors repeat
  misc_feature 1..35: note = Description: MG61-3 effector repeat
  source 1..35: mol_type = unassigned DNA; note = uncultivated organism sequence
gttataaagaacaaataaatgcctgctgttgcagg

SEQ ID NO: 3747 - DNA, 35 bp, unidentified; identical to SEQ ID NO: 3746
  misc_feature 1..35: note = Category: MG61 effectors repeat
  misc_feature 1..35: note = Description: MG61-3 effector repeat
  source 1..35: mol_type = unassigned DNA; note = uncultivated organism sequence

SEQ ID NO: 3748 - DNA, 35 bp, unidentified; identical to SEQ ID NO: 3746
  misc_feature 1..35: note = Category: MG61 effectors repeat
  misc_feature 1..35: note = Description: MG61-3 effector repeat
  source 1..35: mol_type = unassigned DNA; note = uncultivated organism sequence

SEQ ID NO: 3749 - DNA, 35 bp, unidentified; identical to SEQ ID NO: 3746
  misc_feature 1..35: note = Category: MG61 effectors repeat
  misc_feature 1..35: note = Description: MG61-3 effector repeat
  source 1..35: mol_type = unassigned DNA; note = uncultivated organism sequence

SEQ ID NO: 3750 - DNA, 35 bp, unidentified; identical to SEQ ID NO: 3746
  misc_feature 1..35: note = Category: MG61 effectors repeat
  misc_feature 1..35: note = Description: MG61-3 effector repeat
  source 1..35: mol_type = unassigned DNA; note = uncultivated organism sequence

SEQ ID NO: 3751 - DNA, 35 bp, unidentified; identical to SEQ ID NO: 3746
  misc_feature 1..35: note = Category: MG61 effectors repeat
  misc_feature 1..35: note = Description: MG61-3, MG61-12 effectors repeat
  source 1..35: mol_type = unassigned DNA; note = uncultivated organism sequence

SEQ ID NO: 3752 - DNA, 36 bp, unidentified
  misc_feature 1..36: note = Category: MG61 effectors repeat
  misc_feature 1..36: note = Description: MG61-4 effector repeat
  source 1..36: mol_type = unassigned DNA; note = uncultivated organism sequence
agttataaggaacaataaatgcctgctgctgcaggc

SEQ ID NO: 3753 - DNA, 36 bp, unidentified; identical to SEQ ID NO: 3752
  misc_feature 1..36: note = Category: MG61 effectors repeat
  misc_feature 1..36: note = Description: MG61-4 effector repeat
  source 1..36: mol_type = unassigned DNA; note = uncultivated organism sequence

SEQ ID NO: 3754 - DNA, 36 bp, unidentified; identical to SEQ ID NO: 3752
  misc_feature 1..36: note = Category: MG61 effectors repeat
  misc_feature 1..36: note = Description: MG61-4 effector repeat
  source 1..36: mol_type = unassigned DNA; note = uncultivated organism sequence

SEQ ID NO: 3755 - DNA, 36 bp, unidentified; identical to SEQ ID NO: 3752
  misc_feature 1..36: note = Category: MG61 effectors repeat
  misc_feature 1..36: note = Description: MG61-4 effector repeat
  source 1..36: mol_type = unassigned DNA; note = uncultivated organism sequence

SEQ ID NO: 3756 - DNA, 36 bp, unidentified; identical to SEQ ID NO: 3752
  misc_feature 1..36: note = Category: MG61 effectors repeat
  misc_feature 1..36: note = Description: MG61-4 effector repeat
  source 1..36: mol_type = unassigned DNA; note = uncultivated organism sequence

SEQ ID NO: 3757 - DNA, 36 bp, unidentified; identical to SEQ ID NO: 3752
  misc_feature 1..36: note = Category: MG61 effectors repeat
  misc_feature 1..36: note = Description: MG61-4 effector repeat
  source 1..36: mol_type = unassigned DNA; note = uncultivated organism sequence

SEQ ID NO: 3758 - DNA, 36 bp, unidentified; identical to SEQ ID NO: 3752
  misc_feature 1..36: note = Category: MG61 effectors repeat
  misc_feature 1..36: note = Description: MG61-4 effector repeat
  source 1..36: mol_type = unassigned DNA; note = uncultivated organism sequence

SEQ ID NO: 3759 - DNA, 36 bp, unidentified; identical to SEQ ID NO: 3752
  misc_feature 1..36: note = Category: MG61 effectors repeat
  misc_feature 1..36: note = Description: MG61-4 effector repeat
  source 1..36: mol_type = unassigned DNA; note = uncultivated organism sequence

SEQ ID NO: 3760 - DNA, 36 bp, unidentified; identical to SEQ ID NO: 3752
  misc_feature 1..36: note = Category: MG61 effectors repeat
  misc_feature 1..36: note = Description: MG61-4, MG61-7, MG61-8, MG61-9, MG61-10, MG61-11,MG61-13, MG61-14, MG61-15 effectors repeat
  source 1..36: mol_type = unassigned DNA; note = uncultivated organism sequence

SEQ ID NO: 3761 - DNA, 36 bp, unidentified
  misc_feature 1..36: note = Category: MG61 effectors repeat
  misc_feature 1..36: note = Description: MG61-5 effector repeat
  source 1..36: mol_type = unassigned DNA; note = uncultivated organism sequence
gttaaaaggatcaaataaatacctgctgttgcaggc

SEQ ID NO: 3762 - DNA, 36 bp, unidentified; identical to SEQ ID NO: 3761
  misc_feature 1..36: note = Category: MG61 effectors repeat
  misc_feature 1..36: note = Description: MG61-5 effector repeat
  source 1..36: mol_type = unassigned DNA; note = uncultivated organism sequence

SEQ ID NO: 3763 - DNA, 36 bp, unidentified; identical to SEQ ID NO: 3761
  misc_feature 1..36: note = Category: MG61 effectors repeat
  misc_feature 1..36: note = Description: MG61-5 effector repeat
  source 1..36: mol_type = unassigned DNA; note = uncultivated organism sequence

SEQ ID NO: 3764 - DNA, 36 bp, unidentified; identical to SEQ ID NO: 3761
  misc_feature 1..36: note = Category: MG61 effectors repeat
  misc_feature 1..36: note = Description: MG61-5 effector repeat
  source 1..36: mol_type = unassigned DNA; note = uncultivated organism sequence

SEQ ID NO: 3765 - DNA, 36 bp, unidentified; identical to SEQ ID NO: 3761
  misc_feature 1..36: note = Category: MG61 effectors repeat
  misc_feature 1..36: note = Description: MG61-5, MG61-6, MG61-16 effectors repeat
  source 1..36: mol_type = unassigned DNA; note = uncultivated organism sequence

SEQ ID NO: 3766 - DNA, 36 bp, unidentified; identical to SEQ ID NO: 3761
  misc_feature 1..36: note = Category: MG61 effectors repeat
  misc_feature 1..36: note = Description: MG61-6 effector repeat
  source 1..36: mol_type = unassigned DNA; note = uncultivated organism sequence

SEQ ID NO: 3767 - DNA, 36 bp, unidentified; identical to SEQ ID NO: 3761
  misc_feature 1..36: note = Category: MG61 effectors repeat
  misc_feature 1..36: note = Description: MG61-6 effector repeat
  source 1..36: mol_type = unassigned DNA; note = uncultivated organism sequence

SEQ ID NO: 3768 - DNA, 36 bp, unidentified; identical to SEQ ID NO: 3761
  misc_feature 1..36: note = Category: MG61 effectors repeat
  misc_feature 1..36: note = Description: MG61-6 effector repeat
  source 1..36: mol_type = unassigned DNA; note = uncultivated organism sequence

SEQ ID NO: 3769 - DNA, 36 bp, unidentified; identical to SEQ ID NO: 3761
  misc_feature 1..36: note = Category: MG61 effectors repeat
  misc_feature 1..36: note = Description: MG61-6 effector repeat
  source 1..36: mol_type = unassigned DNA; note = uncultivated organism sequence

SEQ ID NO: 3770 - DNA, 36 bp, unidentified; identical to SEQ ID NO: 3752
  misc_feature 1..36: note = Category: MG61 effectors repeat
  misc_feature 1..36: note = Description: MG61-7 effector repeat
  source 1..36: mol_type = unassigned DNA; note = uncultivated organism sequence

SEQ ID NO: 3771 - DNA, 36 bp, unidentified; identical to SEQ ID NO: 3752
  misc_feature 1..36: note = Category: MG61 effectors repeat
  misc_feature 1..36: note = Description: MG61-7 effector repeat
  source 1..36: mol_type = unassigned DNA; note = uncultivated organism sequence

SEQ ID NO: 3772 - DNA, 36 bp, unidentified; identical to SEQ ID NO: 3752
  misc_feature 1..36: note = Category: MG61 effectors repeat
  misc_feature 1..36: note = Description: MG61-7 effector repeat
  source 1..36: mol_type = unassigned DNA; note = uncultivated organism sequence

SEQ ID NO: 3773 - DNA, 36 bp, unidentified; identical to SEQ ID NO: 3752
  misc_feature 1..36: note = Category: MG61 effectors repeat
  misc_feature 1..36: note = Description: MG61-7 effector repeat
  source 1..36: mol_type = unassigned DNA; note = uncultivated organism sequence

SEQ ID NO: 3774 - DNA, 36 bp, unidentified; identical to SEQ ID NO: 3752
  misc_feature 1..36: note = Category: MG61 effectors repeat
  misc_feature 1..36: note = Description: MG61-7 effector repeat
  source 1..36: mol_type = unassigned DNA; note = uncultivated organism sequence

SEQ ID NO: 3775 - DNA, 36 bp, unidentified; identical to SEQ ID NO: 3752
  misc_feature 1..36: note = Category: MG61 effectors repeat
  misc_feature 1..36: note = Description: MG61-7 effector repeat
  source 1..36: mol_type = unassigned DNA; note = uncultivated organism sequence

SEQ ID NO: 3776 - DNA, 36 bp, unidentified; identical to SEQ ID NO: 3752
  misc_feature 1..36: note = Category: MG61 effectors repeat
  misc_feature 1..36: note = Description: MG61-7 effector repeat
  source 1..36: mol_type = unassigned DNA; note = uncultivated organism sequence

SEQ ID NO: 3777 - DNA, 36 bp, unidentified; identical to SEQ ID NO: 3752
  misc_feature 1..36: note = Category: MG61 effectors repeat
  misc_feature 1..36: note = Description: MG61-7 effector repeat
  source 1..36: mol_type = unassigned DNA; note = uncultivated organism sequence

SEQ ID NO: 3778 - DNA, 36 bp, unidentified; identical to SEQ ID NO: 3752
  misc_feature 1..36: note = Category: MG61 effectors repeat
  misc_feature 1..36: note = Description: MG61-8 effector repeat
  source 1..36: mol_type = unassigned DNA; note = uncultivated organism sequence

SEQ ID NO: 3779 - DNA, 36 bp, unidentified; identical to SEQ ID NO: 3752
  misc_feature 1..36: note = Category: MG61 effectors repeat
  misc_feature 1..36: note = Description: MG61-8 effector repeat
  source 1..36: mol_type = unassigned DNA; note = uncultivated organism sequence

SEQ ID NO: 3780 - DNA, 36 bp, unidentified; identical to SEQ ID NO: 3752
  misc_feature 1..36: note = Category: MG61 effectors repeat
  misc_feature 1..36: note = Description: MG61-8 effector repeat
  source 1..36: mol_type = unassigned DNA; note = uncultivated organism sequence

SEQ ID NO: 3781 - DNA, 36 bp, unidentified; identical to SEQ ID NO: 3752
  misc_feature 1..36: note = Category: MG61 effectors repeat
  misc_feature 1..36: note = Description: MG61-8 effector repeat
  source 1..36: mol_type = unassigned DNA; note = uncultivated organism sequence

SEQ ID NO: 3782 - DNA, 36 bp, unidentified; identical to SEQ ID NO: 3752
  misc_feature 1..36: note = Category: MG61 effectors repeat
  misc_feature 1..36: note = Description: MG61-8 effector repeat
  source 1..36: mol_type = unassigned DNA; note = uncultivated organism sequence

SEQ ID NO: 3783 - DNA, 36 bp, unidentified; identical to SEQ ID NO: 3752
  misc_feature 1..36: note = Category: MG61 effectors repeat
  misc_feature 1..36: note = Description: MG61-8 effector repeat
  source 1..36: mol_type = unassigned DNA; note = uncultivated organism sequence

SEQ ID NO: 3784 - DNA, 36 bp, unidentified; identical to SEQ ID NO: 3752
  misc_feature 1..36: note = Category: MG61 effectors repeat
  misc_feature 1..36: note = Description: MG61-8 effector repeat
  source 1..36: mol_type = unassigned DNA; note = uncultivated organism sequence

SEQ ID NO: 3785 - DNA, 36 bp, unidentified; identical to SEQ ID NO: 3752
  misc_feature 1..36: note = Category: MG61 effectors repeat
  misc_feature 1..36: note = Description: MG61-8 effector repeat
  source 1..36: mol_type = unassigned DNA; note = uncultivated organism sequence

SEQ ID NO: 3786 - DNA, 36 bp, unidentified; identical to SEQ ID NO: 3752
  misc_feature 1..36: note = Category: MG61 effectors repeat
  misc_feature 1..36: note = Description: MG61-9 effector repeat
  source 1..36: mol_type = unassigned DNA; note = uncultivated organism sequence

SEQ ID NO: 3787 - DNA, 36 bp, unidentified; identical to SEQ ID NO: 3752
  misc_feature 1..36: note = Category: MG61 effectors repeat
  misc_feature 1..36: note = Description: MG61-9 effector repeat
  source 1..36: mol_type = unassigned DNA; note = uncultivated organism sequence

SEQ ID NO: 3788 - DNA, 36 bp, unidentified; identical to SEQ ID NO: 3752
  misc_feature 1..36: note = Category: MG61 effectors repeat
  misc_feature 1..36: note = Description: MG61-9 effector repeat
  source 1..36: mol_type = unassigned DNA; note = uncultivated organism sequence

SEQ ID NO: 3789 - DNA, 36 bp, unidentified; identical to SEQ ID NO: 3752
  misc_feature 1..36: note = Category: MG61 effectors repeat
  misc_feature 1..36: note = Description: MG61-9 effector repeat
  source 1..36: mol_type = unassigned DNA; note = uncultivated organism sequence

SEQ ID NO: 3790 - DNA, 36 bp, unidentified; identical to SEQ ID NO: 3752
  misc_feature 1..36: note = Category: MG61 effectors repeat
  misc_feature 1..36: note = Description: MG61-9 effector repeat
  source 1..36: mol_type = unassigned DNA; note = uncultivated organism sequence

SEQ ID NO: 3791 - DNA, 36 bp, unidentified; identical to SEQ ID NO: 3752
  misc_feature 1..36: note = Category: MG61 effectors repeat
  misc_feature 1..36: note = Description: MG61-9 effector repeat
  source 1..36: mol_type = unassigned DNA; note = uncultivated organism sequence

SEQ ID NO: 3792 - DNA, 36 bp, unidentified; identical to SEQ ID NO: 3752
  misc_feature 1..36: note = Category: MG61 effectors repeat
  misc_feature 1..36: note = Description: MG61-10 effector repeat
  source 1..36: mol_type = unassigned DNA; note = uncultivated organism sequence

SEQ ID NO: 3793 - DNA, 36 bp, unidentified; identical to SEQ ID NO: 3752
  misc_feature 1..36: note = Category: MG61 effectors repeat
  misc_feature 1..36: note = Description: MG61-10 effector repeat
  source 1..36: mol_type = unassigned DNA; note = uncultivated organism sequence

SEQ ID NO: 3794 - DNA, 36 bp, unidentified; identical to SEQ ID NO: 3752
  misc_feature 1..36: note = Category: MG61 effectors repeat
  misc_feature 1..36: note = Description: MG61-10 effector repeat
  source 1..36: mol_type = unassigned DNA; note = uncultivated organism sequence

SEQ ID NO: 3795 - DNA, 36 bp, unidentified; identical to SEQ ID NO: 3752
  misc_feature 1..36: note = Category: MG61 effectors repeat
  misc_feature 1..36: note = Description: MG61-10 effector repeat
  source 1..36: mol_type = unassigned DNA; note = uncultivated organism sequence

SEQ ID NO: 3796 - DNA, 36 bp, unidentified; identical to SEQ ID NO: 3752
  misc_feature 1..36: note = Category: MG61 effectors repeat
  misc_feature 1..36: note = Description: MG61-10 effector repeat
  source 1..36: mol_type = unassigned DNA; note = uncultivated organism sequence

SEQ ID NO: 3797 - DNA, 36 bp, unidentified; identical to SEQ ID NO: 3752
  misc_feature 1..36: note = Category: MG61 effectors repeat
  misc_feature 1..36: note = Description: MG61-10 effector repeat
  source 1..36: mol_type = unassigned DNA; note = uncultivated organism sequence

SEQ ID NO: 3798 - DNA, 36 bp, unidentified; identical to SEQ ID NO: 3752
  misc_feature 1..36: note = Category: MG61 effectors repeat
  misc_feature 1..36: note = Description: MG61-10 effector repeat
  source 1..36: mol_type = unassigned DNA; note = uncultivated organism sequence

SEQ ID NO: 3799 - DNA, 36 bp, unidentified; identical to SEQ ID NO: 3752
  misc_feature 1..36: note = Category: MG61 effectors repeat
  misc_feature 1..36: note = Description: MG61-11 effector repeat
  source 1..36: mol_type = unassigned DNA; note = uncultivated organism sequence

SEQ ID NO: 3800 - DNA, 36 bp, unidentified; identical to SEQ ID NO: 3752
  misc_feature 1..36: note = Category: MG61 effectors repeat
  misc_feature 1..36: note = Description: MG61-11 effector repeat
  source 1..36: mol_type = unassigned DNA; note = uncultivated organism sequence

SEQ ID NO: 3801 - DNA, 36 bp, unidentified; identical to SEQ ID NO: 3752
  misc_feature 1..36: note = Category: MG61 effectors repeat
  misc_feature 1..36: note = Description: MG61-11 effector repeat
  source 1..36: mol_type = unassigned DNA; note = uncultivated organism sequence

SEQ ID NO: 3802 - DNA, 36 bp, unidentified; identical to SEQ ID NO: 3752
  misc_feature 1..36: note = Category: MG61 effectors repeat
  misc_feature 1..36: note = Description: MG61-11 effector repeat
  source 1..36: mol_type = unassigned DNA; note = uncultivated organism sequence

SEQ ID NO: 3803 - DNA, 36 bp, unidentified; identical to SEQ ID NO: 3752
  misc_feature 1..36: note = Category: MG61 effectors repeat
  misc_feature 1..36: note = Description: MG61-11 effector repeat
  source 1..36: mol_type = unassigned DNA; note = uncultivated organism sequence

SEQ ID NO: 3804 - DNA, 36 bp, unidentified; identical to SEQ ID NO: 3752
  misc_feature 1..36: note = Category: MG61 effectors repeat
  misc_feature 1..36: note = Description: MG61-11 effector repeat
  source 1..36: mol_type = unassigned DNA; note = uncultivated organism sequence

SEQ ID NO: 3805 - DNA, 36 bp, unidentified; identical to SEQ ID NO: 3752
  misc_feature 1..36: note = Category: MG61 effectors repeat
  misc_feature 1..36: note = Description: MG61-11 effector repeat
  source 1..36: mol_type = unassigned DNA; note = uncultivated organism sequence

SEQ ID NO: 3806 - DNA, 35 bp, unidentified; identical to SEQ ID NO: 3746
  misc_feature 1..35: note = Category: MG61 effectors repeat
  misc_feature 1..35: note = Description: MG61-12 effector repeat
  source 1..35: mol_type = unassigned DNA; note = uncultivated organism sequence

SEQ ID NO: 3807 - DNA, 35 bp, unidentified; identical to SEQ ID NO: 3746
  misc_feature 1..35: note = Category: MG61 effectors repeat
  misc_feature 1..35: note = Description: MG61-12 effector repeat
  source 1..35: mol_type = unassigned DNA; note = uncultivated organism sequence

SEQ ID NO: 3808 - DNA, 35 bp, unidentified; identical to SEQ ID NO: 3746
  misc_feature 1..35: note = Category: MG61 effectors repeat
  misc_feature 1..35: note = Description: MG61-12 effector repeat
  source 1..35: mol_type = unassigned DNA; note = uncultivated organism sequence

SEQ ID NO: 3809 - DNA, 35 bp, unidentified; identical to SEQ ID NO: 3746
  misc_feature 1..35: note = Category: MG61 effectors repeat
  misc_feature 1..35: note = Description: MG61-12 effector repeat
  source 1..35: mol_type = unassigned DNA; note = uncultivated organism sequence

SEQ ID NO: 3810 - DNA, 35 bp, unidentified; identical to SEQ ID NO: 3746
  misc_feature 1..35: note = Category: MG61 effectors repeat
  misc_feature 1..35: note = Description: MG61-12 effector repeat
  source 1..35: mol_type = unassigned DNA; note = uncultivated organism sequence

SEQ ID NO: 3811 - DNA, 36 bp, unidentified; identical to SEQ ID NO: 3752
  misc_feature 1..36: note = Category: MG61 effectors repeat
  misc_feature 1..36: note = Description: MG61-13 effector repeat
  source 1..36: mol_type = unassigned DNA; note = uncultivated organism sequence

SEQ ID NO: 3812 - DNA, 36 bp, unidentified; identical to SEQ ID NO: 3752
  misc_feature 1..36: note = Category: MG61 effectors repeat
  misc_feature 1..36: note = Description: MG61-13 effector repeat
  source 1..36: mol_type = unassigned DNA; note = uncultivated organism sequence

SEQ ID NO: 3813 - DNA, 36 bp, unidentified; identical to SEQ ID NO: 3752
  misc_feature 1..36: note = Category: MG61 effectors repeat
  misc_feature 1..36: note = Description: MG61-13 effector repeat
  source 1..36: mol_type = unassigned DNA; note = uncultivated organism sequence

SEQ ID NO: 3814 - DNA, 36 bp, unidentified; identical to SEQ ID NO: 3752
  misc_feature 1..36: note = Category: MG61 effectors repeat
  misc_feature 1..36: note = Description: MG61-13 effector repeat
  source 1..36: mol_type = unassigned DNA; note = uncultivated organism sequence

SEQ ID NO: 3815 - DNA, 36 bp, unidentified; identical to SEQ ID NO: 3752
  misc_feature 1..36: note = Category: MG61 effectors repeat
  misc_feature 1..36: note = Description: MG61-13 effector repeat
  source 1..36: mol_type = unassigned DNA; note = uncultivated organism sequence

SEQ ID NO: 3816 - DNA, 36 bp, unidentified; identical to SEQ ID NO: 3752
  misc_feature 1..36: note = Category: MG61 effectors repeat
  misc_feature 1..36: note = Description: MG61-13 effector repeat
  source 1..36: mol_type = unassigned DNA; note = uncultivated organism sequence

SEQ ID NO: 3817 - DNA, 36 bp, unidentified; identical to SEQ ID NO: 3752
  misc_feature 1..36: note = Category: MG61 effectors repeat
  misc_feature 1..36: note = Description: MG61-13 effector repeat
  source 1..36: mol_type = unassigned DNA; note = uncultivated organism sequence

SEQ ID NO: 3818 - DNA, 36 bp, unidentified; identical to SEQ ID NO: 3752
  misc_feature 1..36: note = Category: MG61 effectors repeat
  misc_feature 1..36: note = Description: MG61-13 effector repeat
  source 1..36: mol_type = unassigned DNA; note = uncultivated organism sequence

SEQ ID NO: 3819 - DNA, 36 bp, unidentified; identical to SEQ ID NO: 3752
  misc_feature 1..36: note = Category: MG61 effectors repeat
  misc_feature 1..36: note = Description: MG61-14 effector repeat
  source 1..36: mol_type = unassigned DNA; note = uncultivated organism sequence

SEQ ID NO: 3820 - DNA, 36 bp, unidentified; identical to SEQ ID NO: 3752
  misc_feature 1..36: note = Category: MG61 effectors repeat
  misc_feature 1..36: note = Description: MG61-14 effector repeat
  source 1..36: mol_type = unassigned DNA; note = uncultivated organism sequence

SEQ ID NO: 3821 - DNA, 36 bp, unidentified; identical to SEQ ID NO: 3752
  misc_feature 1..36: note = Category: MG61 effectors repeat
  misc_feature 1..36: note = Description: MG61-14 effector repeat
  source 1..36: mol_type = unassigned DNA; note = uncultivated organism sequence

SEQ ID NO: 3822 - DNA, 36 bp, unidentified; identical to SEQ ID NO: 3752
  misc_feature 1..36: note = Category: MG61 effectors repeat
  misc_feature 1..36: note = Description: MG61-14 effector repeat
  source 1..36: mol_type = unassigned DNA; note = uncultivated organism sequence

SEQ ID NO: 3823 - DNA, 36 bp, unidentified; identical to SEQ ID NO: 3752
  misc_feature 1..36: note = Category: MG61 effectors repeat
  misc_feature 1..36: note = Description: MG61-14 effector repeat
  source 1..36: mol_type = unassigned DNA; note = uncultivated organism sequence

SEQ ID NO: 3824 - DNA, 36 bp, unidentified; identical to SEQ ID NO: 3752
  misc_feature 1..36: note = Category: MG61 effectors repeat
  misc_feature 1..36: note = Description: MG61-14 effector repeat
  source 1..36: mol_type = unassigned DNA; note = uncultivated organism sequence

SEQ ID NO: 3825 - DNA, 36 bp, unidentified; identical to SEQ ID NO: 3752
  misc_feature 1..36: note = Category: MG61 effectors repeat
  misc_feature 1..36: note = Description: MG61-15 effector repeat
  source 1..36: mol_type = unassigned DNA; note = uncultivated organism sequence

SEQ ID NO: 3826 - DNA, 36 bp, unidentified; identical to SEQ ID NO: 3752
  misc_feature 1..36: note = Category: MG61 effectors repeat
  misc_feature 1..36: note = Description: MG61-15 effector repeat
  source 1..36: mol_type = unassigned DNA; note = uncultivated organism sequence

SEQ ID NO: 3827 - DNA, 36 bp, unidentified; identical to SEQ ID NO: 3752
  misc_feature 1..36: note = Category: MG61 effectors repeat
  misc_feature 1..36: note = Description: MG61-15 effector repeat
  source 1..36: mol_type = unassigned DNA; note = uncultivated organism sequence

SEQ ID NO: 3828 - DNA, 36 bp, unidentified; identical to SEQ ID NO: 3752
  misc_feature 1..36: note = Category: MG61 effectors repeat
  misc_feature 1..36: note = Description: MG61-15 effector repeat
  source 1..36: mol_type = unassigned DNA; note = uncultivated organism sequence

SEQ ID NO: 3829 - DNA, 36 bp, unidentified; identical to SEQ ID NO: 3752
  misc_feature 1..36: note = Category: MG61 effectors repeat
  misc_feature 1..36: note = Description: MG61-15 effector repeat
  source 1..36: mol_type = unassigned DNA; note = uncultivated organism sequence

SEQ ID NO: 3830 - DNA, 36 bp, unidentified; identical to SEQ ID NO: 3752
  misc_feature 1..36: note = Category: MG61 effectors repeat
  misc_feature 1..36: note = Description: MG61-15 effector repeat
  source 1..36: mol_type = unassigned DNA; note = uncultivated organism sequence

SEQ ID NO: 3831 - DNA, 36 bp, unidentified; identical to SEQ ID NO: 3761
  misc_feature 1..36: note = Category: MG61 effectors repeat
  misc_feature 1..36: note = Description: MG61-16 effector repeat
  source 1..36: mol_type = unassigned DNA; note = uncultivated organism sequence

SEQ ID NO: 3832 - DNA, 36 bp, unidentified; identical to SEQ ID NO: 3761
  misc_feature 1..36: note = Category: MG61 effectors repeat
  misc_feature 1..36: note = Description: MG61-16 effector repeat
  source 1..36: mol_type = unassigned DNA; note = uncultivated organism sequence

SEQ ID NO: 3833 - DNA, 36 bp, unidentified; identical to SEQ ID NO: 3761
  misc_feature 1..36: note = Category: MG61 effectors repeat
  misc_feature 1..36: note = Description: MG61-16 effector repeat
  source 1..36: mol_type = unassigned DNA; note = uncultivated organism sequence

SEQ ID NO: 3834 - DNA, 36 bp, unidentified; identical to SEQ ID NO: 3761
  misc_feature 1..36: note = Category: MG61 effectors repeat
  misc_feature 1..36: note = Description: MG61-16 effector repeat
  source 1..36: mol_type = unassigned DNA; note = uncultivated organism sequence

SEQ ID NO: 3835 - DNA, 36 bp, unidentified; identical to SEQ ID NO: 3761
  misc_feature 1..36: note = Category: MG61 effectors repeat
  misc_feature 1..36: note = Description: MG61-16 effector repeat
  source 1..36: mol_type = unassigned DNA; note = uncultivated organism sequence

SEQ ID NO: 3836 - DNA, 36 bp, unidentified; identical to SEQ ID NO: 3761
  misc_feature 1..36: note = Category: MG61 effectors repeat
  misc_feature 1..36: note = Description: MG61-16 effector repeat
  source 1..36: mol_type = unassigned DNA; note = uncultivated organism sequence

SEQ ID NO: 3837 - DNA, 36 bp, unidentified; identical to SEQ ID NO: 3761
  misc_feature 1..36: note = Category: MG61 effectors repeat
  misc_feature 1..36: note = Description: MG61-16 effector repeat
  source 1..36: mol_type = unassigned DNA; note = uncultivated organism sequence

SEQ ID NO: 3838 - DNA, 36 bp, unidentified; identical to SEQ ID NO: 3761
  misc_feature 1..36: note = Category: MG61 effectors repeat
  misc_feature 1..36: note = Description: MG61-16 effector repeat
  source 1..36: mol_type = unassigned DNA; note = uncultivated organism sequence

SEQ ID NO: 3839 - DNA, 36 bp, unidentified; identical to SEQ ID NO: 3761
  misc_feature 1..36: note = Category: MG61 effectors repeat
  misc_feature 1..36: note = Description: MG61-16 effector repeat
  source 1..36: mol_type = unassigned DNA; note = uncultivated organism sequence

SEQ ID NO: 3840 - DNA, 36 bp, unidentified; identical to SEQ ID NO: 3761
  misc_feature 1..36: note = Category: MG61 effectors repeat
  misc_feature 1..36: note = Description: MG61-16 effector repeat
  source 1..36: mol_type = unassigned DNA; note = uncultivated organism sequence

SEQ ID NO: 3841 - DNA, 36 bp, unidentified; identical to SEQ ID NO: 3761
  misc_feature 1..36: note = Category: MG61 effectors repeat
  misc_feature 1..36: note = Description: MG61-16 effector repeat
  source 1..36: mol_type = unassigned DNA; note = uncultivated organism sequence

SEQ ID NO: 3842 - DNA, 36 bp, unidentified
  misc_feature 1..36: note = Category: MG61 effectors repeat
  misc_feature 1..36: note = Description: MG61-17 effector repeat
  source 1..36: mol_type = unassigned DNA; note = uncultivated organism sequence
ggttataaggaagcaataaatgcctgctgatgcagg

SEQ ID NO: 3843 - DNA, 36 bp, unidentified; identical to SEQ ID NO: 3842
  misc_feature 1..36: note = Category: MG61 effectors repeat
  misc_feature 1..36: note = Description: MG61-17 effector repeat
  source 1..36: mol_type = unassigned DNA; note = uncultivated organism sequence

SEQ ID NO: 3844 - DNA, 36 bp, unidentified; identical to SEQ ID NO: 3842
  misc_feature 1..36: note = Category: MG61 effectors repeat
  misc_feature 1..36: note = Description: MG61-17 effector repeat
  source 1..36: mol_type = unassigned DNA; note = uncultivated organism sequence

SEQ ID NO: 3845 - DNA, 36 bp, unidentified; identical to SEQ ID NO: 3842
  misc_feature 1..36: note = Category: MG61 effectors repeat
  misc_feature 1..36: note = Description: MG61-17 effector repeat
  source 1..36: mol_type = unassigned DNA; note = uncultivated organism sequence

SEQ ID NO: 3846 - DNA, 36 bp, unidentified; identical to SEQ ID NO: 3842
  misc_feature 1..36: note = Category: MG61 effectors repeat
  misc_feature 1..36: note = Description: MG61-17 effector repeat
  source 1..36: mol_type = unassigned DNA; note = uncultivated organism sequence

SEQ ID NO: 3847 - DNA, 36 bp, unidentified; identical to SEQ ID NO: 3842
  misc_feature 1..36: note = Category: MG61 effectors repeat
  misc_feature 1..36: note = Description: MG61-17 effector repeat
  source 1..36: mol_type = unassigned DNA; note = uncultivated organism sequence

SEQ ID NO: 3848 - DNA, 35 bp, unidentified
  misc_feature 1..35: note = Category: MG62 effectors repeat
  misc_feature 1..35: note = Description: MG62-2 effector repeat
  source 1..35: mol_type = unassigned DNA; note = uncultivated organism sequence
tttaaacatagtatctaatttctacttttgtagat

SEQ ID NO: 3849 - DNA, 37 bp, unidentified
  misc_feature 1..37: note = Category: MG62 effectors repeat
  misc_feature 1..37: note = Description: MG62-3 effector repeat
  source 1..37: mol_type = unassigned DNA; note = uncultivated organism sequence
gtttaaacatagtatctaatttctactttggtagata

SEQ ID NO: 3850 - DNA, 37 bp, unidentified
  misc_feature 1..37: note = Category: MG62 effectors repeat
  misc_feature 1..37: note = Description: MG62-3 effector repeat
  source 1..37: mol_type = unassigned DNA; note = uncultivated organism sequence
gtttaaacatagtatctaatttctactttggtagatt

SEQ ID NO: 3851 - RNA, 43 nt, unidentified
  source 1..43: mol_type = other RNA; note = MG77-1 sgRNA; note = uncultivated organism sequence
  misc_difference 41..43: note = nnn may be deleted
aatttctactctggtagatnnnnnnnnnnnnnnnnnnnnnnnn

SEQ ID NO: 3852 - RNA, 43 nt, unidentified
  source 1..43: mol_type = other RNA; note = MG77-2 sgRNA; note = uncultivated organism sequence
  misc_difference 41..43: note = nnn may be deleted
aatttctacttgtgtagatnnnnnnnnnnnnnnnnnnnnnnnn

SEQ ID NO: 3853 - RNA, 43 nt, unidentified; identical to SEQ ID NO: 3730
  source 1..43: mol_type = other RNA; note = MG78-1 sgRNA; note = uncultivated organism sequence
  misc_feature 41..43: note = nnn may be deleted

SEQ ID NO: 3854 - RNA, 43 nt, unidentified
  source 1..43: mol_type = other RNA; note = MG79-1 sgRNA; note = uncultivated organism sequence
  misc_difference 41..43: note = nnn may be deleted
aatttctactaatgtagatnnnnnnnnnnnnnnnnnnnnnnnn

SEQ ID NO: 3855 - RNA, 43 nt, unidentified; identical to SEQ ID NO: 3608
  source 1..43: mol_type = other RNA; note = MG79-2 sgRNA; note = uncultivated organism sequence
  misc_difference 41..43: note = nnn may be deleted

SEQ ID NO: 3856 - RNA, 43 nt, unidentified
  source 1..43: mol_type = other RNA; note = MG79-3 sgRNA; note = uncultivated organism sequence
  misc_difference 41..43: note = nnn may be deleted
aatttctactatcgtagatnnnnnnnnnnnnnnnnnnnnnnnn

SEQ ID NO: 3857 - RNA, 43 nt, unidentified; identical to SEQ ID NO: 3608
  source 1..43: mol_type = other RNA; note = MG79-4 sgRNA; note = uncultivated organism sequence
  misc_difference 41..43: note = nnn may be deleted

SEQ ID NO: 3858 - DNA, 24 bp, synthetic construct
  misc_feature 1..24: note = Category: Spacer segment
  misc_feature 1..24: note = Description: spacer segment 3
  source 1..24: mol_type = other DNA
gtcgaggcttgcgacgtggtggct

SEQ ID NO: 3859 - DNA, 24 bp, synthetic construct
  misc_feature 1..24: note = Category: Spacer segment
  misc_feature 1..24: note = Description: Spacer segment 4
  source 1..24: mol_type = other DNA
tggagatatcttgaaccttgcatc

SEQ ID NO: 3860 - DNA, 24 bp, synthetic construct
  misc_feature 1..24: note = Category: spacer segment
  misc_feature 1..24: note = Description: spacer segment 1
  source 1..24: mol_type = other DNA
cgtgagccaccacgtcgcaagcct

SEQ ID NO: 3861 - DNA, 24 bp, synthetic construct
  misc_feature 1..24: note = Category: spacer segment
  misc_feature 1..24: note = Description: spacer segment 2
  source 1..24: mol_type = other DNA
gtcgaggcttgcgacgtggtggct

SEQ ID NO: 3862-3868 - skipped (7 entries)

SEQ ID NO: 3869 - DNA, 26 bp, unidentified
  misc_feature 1..26: note = Category: MG28 effectors repeat
  misc_feature 1..26: note = Description: MG28-10, MG28-11 effectors repeat
  source 1..26: mol_type = unassigned DNA; note = uncultivated organism sequence
catataaaatttctactattgtagat

SEQ ID NO: 3870-3889 - skipped (20 entries)

SEQ ID NO: 3890 - DNA, 10 bp, synthetic construct
  misc_feature 1..10: note = Category: PAM Sequence
  misc_feature 1..10: note = Description: PAM sequence corresponding to MG29-1 Target Loci 1
  source 1..10: mol_type = other DNA
aacacagttg

SEQ ID NO: 3891 - DNA, 10 bp, synthetic construct
  misc_feature 1..10: note = Category: PAM Sequence
  misc_feature 1..10: note = Description: PAM sequence corresponding to MG29-1 Target Loci 2
  source 1..10: mol_type = other DNA
tacagttttg

SEQ ID NO: 3892 - DNA, 10 bp, synthetic construct
  misc_feature 1..10: note = Category: PAM Sequence
  misc_feature 1..10: note = Description: PAM sequence corresponding to MG29-1 Target Loci 3
  source 1..10: mol_type = other DNA
tttgaggttg

SEQ ID NO: 3893 - DNA, 10 bp, synthetic construct
  misc_feature 1..10: note = Category: PAM Sequence
  misc_feature 1..10: note = Description: PAM sequence corresponding to MG29-1 Target Loci 4
  source 1..10: mol_type = other DNA
tttgtatttg

SEQ ID NO: 3894 - DNA, 10 bp, synthetic construct
  misc_feature 1..10: note = Category: PAM Sequence
  misc_feature 1..10: note = Description: PAM sequence corresponding to MG29-1 Target Loci 5
  source 1..10: mol_type = other DNA
agttactttg

SEQ ID NO: 3895 - DNA, 10 bp, synthetic construct
  misc_feature 1..10: note = Category: PAM Sequence
  misc_feature 1..10: note = Description: PAM sequence corresponding to MG29-1 Target Loci 6
  source 1..10: mol_type = other DNA
gatgaagttg

SEQ ID NO: 3896 - DNA, 10 bp, synthetic construct
  misc_feature 1..10: note = Category: PAM Sequence
  misc_feature 1..10: note = Description: PAM sequence corresponding to MG29-1 Target Loci 7
  source 1..10: mol_type = other DNA
tagctgtttg

SEQ ID NO: 3897 - DNA, 10 bp, synthetic construct
  misc_feature 1..10: note = Category: PAM Sequence
  misc_feature 1..10: note = Description: PAM sequence corresponding to MG29-1 Target Loci 8
  source 1..10: mol_type = other DNA
atgggctttg

SEQ ID NO: 3898 - DNA, 10 bp, synthetic construct
  misc_feature 1..10: note = Category: PAM Sequence
  misc_feature 1..10: note = Description: PAM sequence corresponding to MG29-1 Target Loci 9
  source 1..10: mol_type = other DNA
gggcaggttg

SEQ ID NO: 3899 - DNA, 10 bp, synthetic construct
  misc_feature 1..10: note = Category: PAM Sequence
  misc_feature 1..10: note = Description: PAM sequence corresponding to MG29-1 Target Loci 10
  source 1..10: mol_type = other DNA
tacatagttg

SEQ ID NO: 3900 - DNA, 10 bp, synthetic construct
  misc_feature 1..10: note = Category: PAM Sequence
  misc_feature 1..10: note = Description: PAM sequence corresponding to MG29-1 Target Loci 11
  source 1..10: mol_type = other DNA
tacgcatttg

SEQ ID NO: 3901 - DNA, 10 bp, synthetic construct
  misc_feature 1..10: note = Category: PAM Sequence
  misc_feature 1..10: note = Description: PAM sequence corresponding to MG29-1 Target Loci 12
  source 1..10: mol_type = other DNA
ccgcaagttg

SEQ ID NO: 3902 - DNA, 10 bp, synthetic construct
  misc_feature 1..10: note = Category: PAM Sequence
  misc_feature 1..10: note = Description: PAM sequence corresponding to MG31-1 Target Loci 1
  source 1..10: mol_type = other DNA
gttttcttta

SEQ ID NO: 3903 - DNA, 10 bp, synthetic construct
  misc_feature 1..10: note = Category: PAM Sequence
  misc_feature 1..10: note = Description: PAM sequence corresponding to MG31-1 Target Loci 2
  source 1..10: mol_type = other DNA
tacagttttg

SEQ ID NO: 3904 - DNA, 10 bp, synthetic construct
  misc_feature 1..10: note = Category: PAM Sequence
  misc_feature 1..10: note = Description: PAM sequence corresponding to MG31-1 Target Loci 3
  source 1..10: mol_type = other DNA
agaactttta

SEQ ID NO: 3905 - DNA, 10 bp, synthetic construct
  misc_feature 1..10: note = Category: PAM Sequence
  misc_feature 1..10: note = Description: PAM sequence corresponding to MG31-1 Target Loci 4
  source 1..10: mol_type = other DNA
tttgtatttg

SEQ ID NO: 3906 - DNA, 10 bp, synthetic construct
  misc_feature 1..10: note = Category: PAM Sequence
  misc_feature 1..10: note = Description: PAM sequence corresponding to MG31-1 Target Loci 5
  source 1..10: mol_type = other DNA
agttactttg

SEQ ID NO: 3907 - DNA, 10 bp, synthetic construct
  misc_feature 1..10: note = Category: PAM Sequence
  misc_feature 1..10: note = Description: PAM sequence corresponding to MG31-1 Target Loci 6
  source 1..10: mol_type = other DNA
ttttttttta

SEQ ID NO: 3908 - DNA, 10 bp, synthetic construct
  misc_feature 1..10: note = Category: PAM Sequence
  misc_feature 1..10: note = Description: PAM sequence corresponding to MG31-1 Target Loci 7
  source 1..10: mol_type = other DNA
tagctgtttg

SEQ ID NO: 3909 - DNA, 10 bp, synthetic construct
  misc_feature 1..10: note = Category: PAM Sequence
  misc_feature 1..10: note = Description: PAM sequence corresponding to MG31-1 Target Loci 8
  source 1..10: mol_type = other DNA
atgggctttg

SEQ ID NO: 3910 - DNA, 10 bp, synthetic construct
  misc_feature 1..10: note = Category: PAM Sequence
  misc_feature 1..10: note = Description: PAM sequence corresponding to MG31-1 Target Loci 9
  source 1..10: mol_type = other DNA
tccctcttta

SEQ ID NO: 3911 - DNA, 10 bp, synthetic construct
  misc_feature 1..10: note = Category: PAM Sequence
  misc_feature 1..10: note = Description: PAM sequence corresponding to MG31-1 Target Loci 10
  source 1..10: mol_type = other DNA
acaaatttta

SEQ ID NO: 3912 - DNA, 10 bp, synthetic construct
  misc_feature 1..10: note = Category: PAM Sequence
  misc_feature 1..10: note = Description: PAM sequence corresponding to MG31-1 Target Loci 11
  source 1..10: mol_type = other DNA
tacgcatttg

SEQ ID NO: 3913 - DNA, 10 bp, synthetic construct
  misc_feature 1..10: note = Category: PAM Sequence
  misc_feature 1..10: note = Description: PAM sequence corresponding to MG31-1 Target Loci 12
  source 1..10: mol_type = other DNA
gaaaaattta

SEQ ID NO: 3914 - DNA, 24 bp, synthetic construct
  misc_feature 1..24: note = Category: Target Sequence
  misc_feature 1..24: note = Description: MG29-1 Target Loci 1
  source 1..24: mol_type = other DNA
tgtcagaagcaaatgtaagcaata

SEQ ID NO: 3915 - DNA, 24 bp, synthetic construct
  misc_feature 1..24: note = Category: Target Sequence
  misc_feature 1..24: note = Description: MG29-1 Target Loci 2
  source 1..24: mol_type = other DNA
ctgaaaggttattgttgtgtttgt

SEQ ID NO: 3916 - DNA, 24 bp, synthetic construct
  misc_feature 1..24: note = Category: Target Sequence
  misc_feature 1..24: note = Description: MG29-1 Target Loci 3
  source 1..24: mol_type = other DNA
ctagtgaacacagttgtgtcagaa

SEQ ID NO: 3917 - DNA, 24 bp, synthetic construct
  misc_feature 1..24: note = Category: Target Sequence
  misc_feature 1..24: note = Description: MG29-1 Target Loci 4
  source 1..24: mol_type = other DNA
tgaagtcttacaaggttatcttat

SEQ ID NO: 3918 - DNA, 24 bp, synthetic construct
  misc_feature 1..24: note = Category: Target Sequence
  misc_feature 1..24: note = Description: MG29-1 Target Loci 5
  source 1..24: mol_type = other DNA
cactttccttagtgcgcaaaagaa

SEQ ID NO: 3919 - DNA, 24 bp, synthetic construct
  misc_feature 1..24: note = Category: Target Sequence
  misc_feature 1..24: note = Description: MG29-1 Target Loci 6
  source 1..24: mol_type = other DNA
gtggtgaggccctgggcaggttgg

SEQ ID NO: 3920 - DNA, 24 bp, synthetic construct
  misc_feature 1..24: note = Category: Target Sequence
  misc_feature 1..24: note = Description: MG29-1 Target Loci 7
  source 1..24: mol_type = other DNA
ggaggtcagaaatagggggtccag

SEQ ID NO: 3921 - DNA, 24 bp, synthetic construct
  misc_feature 1..24: note = Category: Target Sequence
  misc_feature 1..24: note = Description: MG29-1 Target Loci 8
  source 1..24: mol_type = other DNA
gaaagggggtggggggagtttgct

SEQ ID NO: 3922 - DNA, 24 bp, synthetic construct
  misc_feature 1..24: note = Category: Target Sequence
  misc_feature 1..24: note = Description: MG29-1 Target Loci 9
  source 1..24: mol_type = other DNA
gtatcaaggttacaagacaggttt

SEQ ID NO: 3923 - DNA, 24 bp, synthetic construct
  misc_feature 1..24: note = Category: Target Sequence
  misc_feature 1..24: note = Description: MG29-1 Target Loci 10
  source 1..24: mol_type = other DNA
tgtgagggagcaccgttctctaga

SEQ ID NO: 3924 - DNA, 24 bp, synthetic construct
  misc_feature 1..24: note = Category: Target Sequence
  misc_feature 1..24: note = Description: MG29-1 Target Loci 11
  source 1..24: mol_type = other DNA
ggtagttttctgtggtcctattat

SEQ ID NO: 3925 - DNA, 24 bp, synthetic construct
  misc_feature 1..24: note = Category: Target Sequence
  misc_feature 1..24: note = Description: MG29-1 Target Loci 12
  source 1..24: mol_type = other DNA
ccaggaaagttgatgtggtctgcg

SEQ ID NO: 3926 - DNA, 24 bp, synthetic construct
  misc_feature 1..24: note = Category: Target Sequence
  misc_feature 1..24: note = Description: MG31-1 Target Loci 1
  source 1..24: mol_type = other DNA
gttattaatttcttgctacttgtc

SEQ ID NO: 3927 - DNA, 24 bp, synthetic construct
  misc_feature 1..24: note = Category: Target Sequence
  misc_feature 1..24: note = Description: MG31-1 Target Loci 2
  source 1..24: mol_type = other DNA
ctgaaaggttattgttgtgtttgt

SEQ ID NO: 3928 - DNA, 24 bp, synthetic construct
  misc_feature 1..24: note = Category: Target Sequence
  misc_feature 1..24: note = Description: MG31-1 Target Loci 3
  source 1..24: mol_type = other DNA
gtgttagtacagttttgctgaaag

SEQ ID NO: 3929 - DNA, 24 bp, synthetic construct
  misc_feature 1..24: note = Category: Target Sequence
  misc_feature 1..24: note = Description: MG31-1 Target Loci 4
  source 1..24: mol_type = other DNA
tgaagtcttacaaggttatcttat

SEQ ID NO: 3930 - DNA, 24 bp, synthetic construct
  misc_feature 1..24: note = Category: Target Sequence
  misc_feature 1..24: note = Description: MG31-1 Target Loci 5
  source 1..24: mol_type = other DNA
cactttccttagtgcgcaaaagaa

SEQ ID NO: 3931 - DNA, 24 bp, synthetic construct
  misc_feature 1..24: note = Category: Target Sequence
  misc_feature 1..24: note = Description: MG31-1 Target Loci 6
  source 1..24: mol_type = other DNA
cctaggatgtttgaattttattaa

SEQ ID NO: 3932 - DNA, 24 bp, synthetic construct
  misc_feature 1..24: note = Category: Target Sequence
  misc_feature 1..24: note = Description: MG31-1 Target Loci 7
  source 1..24: mol_type = other DNA
ggaggtcagaaatagggggtccag

SEQ ID NO: 3933 - DNA, 24 bp, synthetic construct
  misc_feature 1..24: note = Category: Target Sequence
  misc_feature 1..24: note = Description: MG31-1 Target Loci 8
  source 1..24: mol_type = other DNA
gaaagggggtggggggagtttgct

SEQ ID NO: 3934 - DNA, 24 bp, synthetic construct
  misc_feature 1..24: note = Category: Target Sequence
  misc_feature 1..24: note = Description: MG31-1 Target Loci 9
  source 1..24: mol_type = other DNA
gccagagccggggtgtgcagacgg

SEQ ID NO: 3935 - DNA, 24 bp, synthetic construct
  misc_feature 1..24: note = Category: Target Sequence
  misc_feature 1..24: note = Description: MG31-1 Target Loci 10
  source 1..24: mol_type = other DNA
cttggaccttgttttgcttactgt

SEQ ID NO: 3936 - DNA, 24 bp, synthetic construct
  misc_feature 1..24: note = Category: Target Sequence
  misc_feature 1..24: note = Description: MG31-1 Target Loci 11
  source 1..24: mol_type = other DNA
ggtagttttctgtggtcctattat

SEQ ID NO: 3937 - DNA, 24 bp, synthetic construct
  misc_feature 1..24: note = Category: Target Sequence
  misc_feature 1..24: note = Description: MG31-1 Target Loci 12
  source 1..24: mol_type = other DNA
atcataagaagttagcttgacgca

SEQ ID NO: 3938 - protein, 7 aa, Simian virus 40
  REGION 1..7: note = Category: NLS
  REGION 1..7: note = Description: SV40
PKKKRKV

SEQ ID NO: 3939 - protein, 16 aa, unidentified
  REGION 1..16: note = Category: NLS
  REGION 1..16: note = Description: nucleoplasmin bipartite NLS
  source 1..16: note = nucleoplasmin bipartite NLS sequence
KRPAATKKAGQAKKKK

SEQ ID NO: 3940 - protein, 9 aa, unidentified
  REGION 1..9: note = Category: NLS
  REGION 1..9: note = Description: c-myc NLS
  source 1..9: note = c-myc NLS sequence
PAAKRVKLD

SEQ ID NO: 3941 - protein, 11 aa, unidentified
  REGION 1..11: note = Category: NLS
  REGION 1..11: note = Description: c-myc NLS
  source 1..11: note = c-myc NLS sequence
RQRRNELKRSP

SEQ ID NO: 3942 - protein, 38 aa, Homo sapiens
  REGION 1..38: note = Category: NLS
  REGION 1..38: note = Description: hRNPA1 M9 NLS
NQSSNFGPMKGGNFGGRSSGPYGGGGQYFAKPRNQGGY

SEQ ID NO: 3943 - protein, 42 aa, unidentified
  REGION 1..42: note = Category: NLS
  REGION 1..42: note = Description: Importin-alpha IBB domain
  source 1..42: note = Importin-alpha IBB domain sequence
RMRIZFKNKGKDTAELRRRRVEVSVELRKAKKDEQILKRRNV

SEQ ID NO: 3944 - protein, 8 aa, unidentified
  REGION 1..8: note = Category: NLS
  REGION 1..8: note = Description: Myoma T protein
  source 1..8: note = Myoma T protein sequence
VSRKRPRP

SEQ ID NO: 3945 - protein, 8 aa, unidentified
  REGION 1..8: note = Category: NLS
  REGION 1..8: note = Description: Myoma T protein
  source 1..8: note = Myoma T protein sequence
PPKKARED

SEQ ID NO: 3946 - protein, 8 aa, unidentified
  REGION 1..8: note = Category: NLS
  REGION 1..8: note = Description: p53
  source 1..8: note = p53 sequence
PQPKKKPL

SEQ ID NO: 3947 - protein, 12 aa, Mus sp.
  REGION 1..12: note = Category: NLS
  REGION 1..12: note = Description: mouse c-abl IV
SALIKKKKKMAP

SEQ ID NO: 3948 - protein, 5 aa, Influenza virus
  REGION 1..5: note = Category: NLS
  REGION 1..5: note = Description: influenza virus NS1
DRLRR

SEQ ID NO: 3949 - protein, 7 aa, Influenza virus
  REGION 1..7: note = Category: NLS
  REGION 1..7: note = Description: influenza virus NS1
PKQKKRK

SEQ ID NO: 3950 - protein, 10 aa, Hepatitis delta virus
  REGION 1..10: note = Category: NLS
  REGION 1..10: note = Description: Hepatitis virus delta antigen
RKLKKKIKKL

SEQ ID NO: 3951 - protein, 10 aa, Mus sp.
  REGION 1..10: note = Category: NLS
  REGION 1..10: note = Description: mouse Mx1 protein
REKKKFLKRR

SEQ ID NO: 3952 - protein, 20 aa, Homo sapiens
  REGION 1..20: note = Category: NLS
  REGION 1..20: note = Description: human poly(ADP-ribose) polymerase
KRKGDEVDGVDEVAKKKSKK

SEQ ID NO: 3953 - protein, 17 aa, Homo sapiens
  REGION 1..17: note = Category: NLS
  REGION 1..17: note = Description: steroid hormone receptors (human) glucocorticoid
RKCLQAGMNLEARKTKK

SEQ ID NO: 3954 - DNA, 24 bp, synthetic construct
  misc_feature 1..24: note = Category: MG29 HEK targeting guides
  misc_feature 1..24: note = Description: MG29-1 guide sequence 1 for targetingApolipoprotein
  source 1..24: mol_type = other DNA
ccaggaaagttgatgtggtctgcg

SEQ ID NO: 3955 - DNA, 24 bp, synthetic construct
  misc_feature 1..24: note = Category: MG29 HEK targeting guides
  misc_feature 1..24: note = Description: MG29-1 guide sequence 1 for targeting HBB_R01
  source 1..24: mol_type = other DNA
ctagtgaacacagttgtgtcagaa

SEQ ID NO: 3956 - DNA, 24 bp, synthetic construct
  misc_feature 1..24: note = Category: MG29 HEK targeting guides
  misc_feature 1..24: note = Description: MG29-1 guide sequence 2 for targeting HBB_R01
  source 1..24: mol_type = other DNA
gtatcaaggttacaagacaggttt

SEQ ID NO: 3957 - DNA, 24 bp, synthetic construct
  misc_feature 1..24: note = Category: MG29 HEK targeting guides
  misc_feature 1..24: note = Description: MG29-1 guide sequence 3 for targeting HBB_R01
  source 1..24: mol_type = other DNA
gtggtgaggccctgggcaggttgg

SEQ ID NO: 3958 - DNA, 24 bp, synthetic construct
  misc_feature 1..24: note = Category: MG29 HEK targeting guides
  misc_feature 1..24: note = Description: MG29-1 guide sequence 4 for targeting HBB_R01
  source 1..24: mol_type = other DNA
tgtcagaagcaaatgtaagcaata

SEQ ID NO: 3959 - DNA, 24 bp, synthetic construct
  misc_feature 1..24: note = Category: MG29 HEK targeting guides
  misc_feature 1..24: note = Description: MG29-1 guide sequence 1 for targetingApolipoprotein
  source 1..24: mol_type = other DNA
tgtgagggagcaccgttctctaga

SEQ ID NO: 3960 - DNA, 24 bp, synthetic construct
  misc_feature 1..24: note = Category: MG29 HEK targeting guides
  misc_feature 1..24: note = Description: MG29-1 guide sequence 1 for targeting VEGFA
  source 1..24: mol_type = other DNA
ccccgcctccgggcgcgggctccg

SEQ ID NO: 3961 - DNA, 24 bp, synthetic construct
  misc_feature 1..24: note = Category: MG29 HEK targeting guides
  misc_feature 1..24: note = Description: MG29-1 guide sequence 2 for targeting VEGFA
  source 1..24: mol_type = other DNA
ccgaagcgagaacagcccagaagt

SEQ ID NO: 3962 - DNA, 24 bp, synthetic construct
  misc_feature 1..24: note = Category: MG29 HEK targeting guides
  misc_feature 1..24: note = Description: MG29-1 guide sequence 3 for targeting VEGFA
  source 1..24: mol_type = other DNA
ccgcgcggaccacggctcctccga

SEQ ID NO: 3963 - DNA, 24 bp, synthetic construct
  misc_feature 1..24: note = Category: MG29 HEK targeting guides
  misc_feature 1..24: note = Description: MG29-1 guide sequence 4 for targeting VEGFA
  source 1..24: mol_type = other DNA
gaagttggacgaaaagtttcagtg

SEQ ID NO: 3964 - DNA, 24 bp, synthetic construct
  misc_feature 1..24: note = Category: MG29 HEK targeting guides
  misc_feature 1..24: note = Description: MG29-1 guide sequence 5 for targeting VEGFA
  source 1..24: mol_type = other DNA
gaggcggggtggagggggtcgggg

SEQ ID NO: 3965 - DNA, 24 bp, synthetic construct
  misc_feature 1..24: note = Category: MG29 HEK targeting guides
  misc_feature 1..24: note = Description: MG29-1 guide sequence 6 for targeting VEGFA
  source 1..24: mol_type = other DNA
ggcgcgggctccggcccctgcccg

SEQ ID NO: 3966 - DNA, 24 bp, synthetic construct
  misc_feature 1..24: note = Category: MG31 HEK targeting guides
  misc_feature 1..24: note = Description: MG31-1 guide sequence 1 for targetingApolipoprotein
  source 1..24: mol_type = other DNA
atcataagaagttagcttgacgca

SEQ ID NO: 3967 - DNA, 24 bp, synthetic construct
  misc_feature 1..24: note = Category: MG31 HEK targeting guides
  misc_feature 1..24: note = Description: MG31-1 guide sequence 1 for targeting Albumin
  source 1..24: mol_type = other DNA
cctaggatgtttgaattttattaa

SEQ ID NO: 3968 - DNA, 24 bp, synthetic construct
  misc_feature 1..24: note = Category: MG31 HEK targeting guides
  misc_feature 1..24: note = Description: MG29-1, MG31-1 guide sequence 1 for targetingFibrinogen
  source 1..24: mol_type = other DNA
ctgaaaggttattgttgtgtttgt

SEQ ID NO: 3969 - DNA, 24 bp, synthetic construct
  misc_feature 1..24: note = Category: MG31 HEK targeting guides
  misc_feature 1..24: note = Description: MG31-1 guide sequence 1 for targetingApolipoprotein
  source 1..24: mol_type = other DNA
cttggaccttgttttgcttactgt

SEQ ID NO: 3970 - DNA, 24 bp, synthetic construct
  misc_feature 1..24: note = Category: MG31 HEK targeting guides
  misc_feature 1..24: note = Description: MG29-1, MG31-1 guide sequence 2 for targetingApolipoprotein
  source 1..24: mol_type = other DNA
ggtagttttctgtggtcctattat

SEQ ID NO: 3971 - DNA, 24 bp, synthetic construct
  misc_feature 1..24: note = Category: MG31 HEK targeting guides
  misc_feature 1..24: note = Description: MG31-1 guide sequence 1 for targeting Fibrinogen
  source 1..24: mol_type = other DNA
gtgttagtacagttttgctgaaag

SEQ ID NO: 3972 - DNA, 24 bp, synthetic construct
  misc_feature 1..24: note = Category: MG31 HEK targeting guides
  misc_feature 1..24: note = Description: MG31-1 guide sequence 2 for targeting Fibrinogen
  source 1..24: mol_type = other DNA
gttattaatttcttgctacttgtc

SEQ ID NO: 3973 - DNA, 24 bp, synthetic construct
  misc_feature 1..24: note = Category: MG32 HEK targeting guides
  misc_feature 1..24: note = Description: MG28-1, MG28-1, MG30-1, MG30-1, MG32-1 guidesequence 1 for targeting Fibrinogen
  source 1..24: mol_type = other DNA
agcaaaactgtactaacactaaaa

SEQ ID NO: 3974 - DNA, 24 bp, synthetic construct
  misc_feature 1..24: note = Category: MG32 HEK targeting guides
  misc_feature 1..24: note = Description: MG28-1, MG28-1, MG30-1, MG30-1, MG32-1 guidesequence 1 for targeting VEGFA
  source 1..24: mol_type = other DNA
agtgcgacgccgcgagccccgacc

SEQ ID NO: 3975 - DNA, 24 bp, synthetic construct
  misc_feature 1..24: note = Category: MG32 HEK targeting guides
  misc_feature 1..24: note = Description: MG28-1, MG30-1, MG32-1 guide sequence 2 fortargeting VEGFA
  source 1..24: mol_type = other DNA
caaagcccattccctctttagcca

SEQ ID NO: 3976 - DNA, 24 bp, synthetic construct
  misc_feature 1..24: note = Category: MG32 HEK targeting guides
  misc_feature 1..24: note = Description: MG28-1, MG28-1, MG29-1, MG30-1, MG30-1, MG31-1,MG32-1 guide sequence 1 for targeting Albumin
  source 1..24: mol_type = other DNA
cactttccttagtgcgcaaaagaa

SEQ ID NO: 3977 - DNA, 24 bp, synthetic construct
  misc_feature 1..24: note = Category: MG32 HEK targeting guides
  misc_feature 1..24: note = Description: MG28-1, MG28-1, MG30-1, MG30-1, MG32-1 guidesequence 1 for targeting VEGFA
  source 1..24: mol_type = other DNA
cgtccaacttctgggctgttctcg

SEQ ID NO: 3978 - DNA, 24 bp, synthetic construct
  misc_feature 1..24: note = Category: MG32 HEK targeting guides
  misc_feature 1..24: note = Description: MG28-1, MG30-1, MG32-1 guide sequence 1 fortargeting Apolipoprotein
  source 1..24: mol_type = other DNA
ctaagacaaattttacttggacct

SEQ ID NO: 3979 - DNA, 24 bp, synthetic construct
  misc_feature 1..24: note = Category: MG32 HEK targeting guides
  misc_feature 1..24: note = Description: MG28-1, MG28-1, MG29-1, MG30-1, MG30-1, MG31-1,MG32-1 guide sequence 1 for targeting VEGFA
  source 1..24: mol_type = other DNA
gaaagggggtggggggagtttgct

SEQ ID NO: 3980 - DNA, 24 bp, synthetic construct
  misc_feature 1..24: note = Category: MG32 HEK targeting guides
  misc_feature 1..24: note = Description: MG28-1, MG28-1, MG30-1, MG30-1, MG31-1, MG32-1 guidesequence 2 for targeting VEGFA
  source 1..24: mol_type = other DNA
gccagagccggggtgtgcagacgg

SEQ ID NO: 3981 - DNA, 24 bp, synthetic construct
  misc_feature 1..24: note = Category: MG32 HEK targeting guides
  misc_feature 1..24: note = Description: MG28-1, MG28-1, MG29-1, MG30-1, MG30-1, MG31-1,MG32-1 guide sequence 3 for targeting VEGFA
  source 1..24: mol_type = other DNA
ggaggtcagaaatagggggtccag

SEQ ID NO: 3982 - DNA, 24 bp, synthetic construct
  misc_feature 1..24: note = Category: MG32 HEK targeting guides
  misc_feature 1..24: note = Description: MG28-1, MG28-1, MG30-1, MG30-1, MG32-1 guidesequence 1 for targeting Albumin
  source 1..24: mol_type = other DNA
gtatttgtgaagtcttacaaggtt

SEQ ID NO: 3983 - DNA, 24 bp, synthetic construct
  misc_feature 1..24: note = Category: MG32 HEK targeting guides
  misc_feature 1..24: note = Description: MG28-1, MG28-1, MG29-1, MG30-1, MG30-1, MG31-1,MG32-1 guide sequence 2 for targeting Albumin
  source 1..24: mol_type = other DNA
tgaagtcttacaaggttatcttat

SEQ ID NO: 3984 - DNA, 24 bp, synthetic construct
  misc_feature 1..24: note = Category: MG32 HEK targeting guides
  misc_feature 1..24: note = Description: MG28-1, MG30-1, MG32-1 guide sequence 3 fortargeting Albumin
  source 1..24: mol_type = other DNA
ttaataagataaccttgtaagact

SEQ ID NO: 3985 - RNA, 44 nt, unidentified
  source 1..44: mol_type = other RNA; note = uncultivated organism sequence
  modified_base 30: mod_base = m5u
  modified_base 39: mod_base = m5u
  modified_base 40: mod_base = m5u
  modified_base 41: mod_base = m5u
  modified_base 44: mod_base = m5u
taatttctactcttgtagatgaaagggggtggggggagtttgct

SEQ ID NO: 3986 - RNA, 44 nt, synthetic construct; identical to SEQ ID NO: 3985
  source 1..44: mol_type = other RNA; note = MG29-1 guide modificaiton test no. 2
  modified_base 30: mod_base = m5u
  modified_base 39: mod_base = m5u
  modified_base 40: mod_base = m5u
  modified_base 41: mod_base = m5u
  modified_base 44: mod_base = tm
  modified_base 1: mod_base = um
  modified_base 2: mod_base = OTHER; note = 2'-O-methyladenosine
  modified_base 3: mod_base = OTHER; note = 2'-O-methyladenosine
  modified_base 42: mod_base = gm
  modified_base 43: mod_base = cm
  modified_base 1..2: mod_base = OTHER; note = Phosphorothioate
  modified_base 2..3: mod_base = OTHER; note = Phosphorothioate linkage
  modified_base 3..4: mod_base = OTHER; note = Phosphorothioate linkage
  modified_base 42..43: mod_base = OTHER; note = Phosphorothioate linkage
  modified_base 43..44: mod_base = OTHER; note = Phosphorothioate linkage
  modified_base 41..42: mod_base = OTHER; note = Phosphorothioate linkage

SEQ ID NO: 3987 - RNA, 44 nt, synthetic construct; identical to SEQ ID NO: 3985
  source 1..44: mol_type = other RNA; note = MG29-1 guide modification test no. 3
  modified_base 1: mod_base = um
  modified_base 1..2: mod_base = OTHER; note = Phosphorthioate linkage
  modified_base 2: mod_base = OTHER; note = 2'-O-methyladenosine
  modified_base 2..3: mod_base = OTHER; note = Phosphorthioate linkage
  modified_base 42: mod_base = gm
  modified_base 41..42: mod_base = OTHER; note = Phosphorothioate linkage
  modified_base 42..43: mod_base = OTHER; note = Phosphorothioate linkage
  modified_base 43: mod_base = cm
  modified_base 44: mod_base = tm
  modified_base 30: mod_base = m5u
  modified_base 39: mod_base = m5u
  modified_base 40: mod_base = m5u
  modified_base 41: mod_base = m5u

SEQ ID NO: 3988 - RNA, 44 nt, synthetic construct; identical to SEQ ID NO: 3985
  source 1..44: mol_type = other RNA
  modified_base 1: mod_base = um
  modified_base 1..2: mod_base = OTHER; note = Phosphorothioate linkage
  modified_base 30: mod_base = m5u
  modified_base 41..42: mod_base = OTHER; note = Phosphorothioate linkage
  modified_base 42: mod_base = gm
  modified_base 42..43: mod_base = OTHER; note = Phosphorothioate linkage
  modified_base 43: mod_base = cm
  modified_base 43..44: mod_base = OTHER; note = Phosphorothioate linkage
  modified_base 44: mod_base = tm
  modified_base 39: mod_base = m5u
  modified_base 40: mod_base = m5u
  modified_base 41: mod_base = m5u

SEQ ID NO: 3989 - RNA, 44 nt, synthetic construct; identical to SEQ ID NO: 3985
  source 1..44: mol_type = other RNA
  modified_base 1: mod_base = um
  modified_base 1..2: mod_base = OTHER; note = Phosphorothioate linkage
  modified_base 30: mod_base = m5u
  modified_base 43..44: mod_base = OTHER; note = Phosphorothioate linkage
  modified_base 44: mod_base = tm
  modified_base 39: mod_base = m5u
  modified_base 40: mod_base = m5u
  modified_base 41: mod_base = m5u

SEQ ID NO: 3990 - RNA, 45 nt, synthetic construct
  source 1..45: mol_type = other RNA
  modified_base 1: mod_base = cm
  modified_base 1..2: mod_base = OTHER; note = Phosphorothioate linkage
  modified_base 31: mod_base = m5u
  modified_base 42..43: mod_base = OTHER; note = Phosphorthioate linkage
  modified_base 43: mod_base = gm
  modified_base 43..44: mod_base = OTHER; note = Phosphorthioate linkage
  modified_base 44: mod_base = cm
  modified_base 44..45: mod_base = OTHER; note = Phosphorothioate linkage
  modified_base 45: mod_base = tm
  modified_base 40: mod_base = m5u
  modified_base 41: mod_base = m5u
  modified_base 42: mod_base = m5u
ctaatttctactcttgtagatgaaagggggtggggggagtttgct

SEQ ID NO: 3991 - RNA, 45 nt, synthetic construct; identical to SEQ ID NO: 3990
  source 1..45: mol_type = other RNA
  modified_base 1: mod_base = cm
  modified_base 1..2: mod_base = OTHER; note = Phosphorothioate linkage
  modified_base 2..3: mod_base = OTHER; note = Phosphorothioate linkage
  modified_base 43..44: mod_base = OTHER; note = Phosphorothioate linkage
  modified_base 44..45: mod_base = OTHER; note = Phosphorothioate linkage
  modified_base 45: mod_base = tm
  modified_base 31: mod_base = m5u
  modified_base 40: mod_base = m5u
  modified_base 41: mod_base = m5u
  modified_base 42: mod_base = m5u

SEQ ID NO: 3992 - RNA, 44 nt, synthetic construct; identical to SEQ ID NO: 3985
  source 1..44: mol_type = other RNA
  modified_base 30: mod_base = m5u
  modified_base 39: mod_base = m5u
  modified_base 40: mod_base = m5u
  modified_base 41: mod_base = m5u
  modified_base 44: mod_base = m5u

SEQ ID NO: 3993 - DNA, 22 bp, synthetic construct
  misc_feature 1..22: note = Category: MG29-1 spacer used in sgRNA to target mouse albuminintron 1
  misc_feature 1..22: note = Description: mAlb29-1-1
  source 1..22: mol_type = other DNA
gtatagcatggtcgagcaggca

SEQ ID NO: 3994 - DNA, 22 bp, synthetic construct
  misc_feature 1..22: note = Category: MG29-1 spacer used in sgRNA to target mouse albuminintron 1
  misc_feature 1..22: note = Description: mAlb29-1-2
  source 1..22: mol_type = other DNA
ccgatcgttacaggaaaatctg

SEQ ID NO: 3995 - DNA, 22 bp, synthetic construct
  misc_feature 1..22: note = Category: MG29-1 spacer used in sgRNA to target mouse albuminintron 1
  misc_feature 1..22: note = Description: mAlb29-1-3
  source 1..22: mol_type = other DNA
aatttattacggtctcataggg

SEQ ID NO: 3996 - DNA, 22 bp, synthetic construct
  misc_feature 1..22: note = Category: MG29-1 spacer used in sgRNA to target mouse albuminintron 1
  misc_feature 1..22: note = Description: mAlb29-1-4
  source 1..22: mol_type = other DNA
ttacggtctcatagggcctgcc

SEQ ID NO: 3997 - DNA, 22 bp, synthetic construct
  misc_feature 1..22: note = Category: MG29-1 spacer used in sgRNA to target mouse albuminintron 1
  misc_feature 1..22: note = Description: mAlb29-1-5
  source 1..22: mol_type = other DNA
cctgtaacgatcgggaactggc

SEQ ID NO: 3998 - DNA, 22 bp, synthetic construct
  misc_feature 1..22: note = Category: MG29-1 spacer used in sgRNA to target mouse albuminintron 1
  misc_feature 1..22: note = Description: mAlb29-1-7
  source 1..22: mol_type = other DNA
agtatagcatggtcgagcaggc

SEQ ID NO: 3999 - DNA, 22 bp, synthetic construct
  misc_feature 1..22: note = Category: MG29-1 spacer used in sgRNA to target mouse albuminintron 1
  misc_feature 1..22: note = Description: mAlb29-1-8
  source 1..22: mol_type = other DNA
ctgtaacgatcgggaactggca

SEQ ID NO: 4000 - DNA, 22 bp, synthetic construct
  misc_feature 1..22: note = Category: MG29-1 spacer used in sgRNA to target mouse albuminintron 1
  misc_feature 1..22: note = Description: mAlb29-1-9
  source 1..22: mol_type = other DNA
gatacagttgaatttattacgg

SEQ ID NO: 4001 - DNA, 22 bp, synthetic construct
  misc_feature 1..22: note = Category: MG29-1 spacer used in sgRNA to target mouse albuminintron 1
  misc_feature 1..22: note = Description: mAlb29-1-10
  source 1..22: mol_type = other DNA
tagtatagcatggtcgagcagg

SEQ ID NO: 4002 - DNA, 22 bp, synthetic construct
  misc_feature 1..22: note = Category: MG29-1 spacer used in sgRNA to target mouse albuminintron 1
  misc_feature 1..22: note = Description: mAlb29-1-11
  source 1..22: mol_type = other DNA
catctgagaacccttaggtggt

SEQ ID NO: 4003 - DNA, 22 bp, synthetic construct
  misc_feature 1..22: note = Category: MG29-1 spacer used in sgRNA to target mouse albuminintron 1
  misc_feature 1..22: note = Description: mAlb29-1-12
  source 1..22: mol_type = other DNA
agtgtagcagagaggaaccatt

SEQ ID NO: 4004 - DNA, 22 bp, synthetic construct
  misc_feature 1..22: note = Category: MG29-1 spacer used in sgRNA to target mouse albuminintron 1
  misc_feature 1..22: note = Description: mAlb29-1-13
  source 1..22: mol_type = other DNA
ctagtaatggaagcctggtatt

SEQ ID NO: 4005 - DNA, 22 bp, synthetic construct
  misc_feature 1..22: note = Category: MG29-1 spacer used in sgRNA to target mouse albuminintron 1
  misc_feature 1..22: note = Description: mAlb29-1-14
  source 1..22: mol_type = other DNA
ggtatctttgatgacaataatg

SEQ ID NO: 4006 - DNA, 22 bp, synthetic construct
  misc_feature 1..22: note = Category: MG29-1 spacer used in sgRNA to target mouse albuminintron 1
  misc_feature 1..22: note = Description: mAlb29-1-15
  source 1..22: mol_type = other DNA
tctagtaatggaagcctggtat

SEQ ID NO: 4007 - DNA, 22 bp, synthetic construct
  misc_feature 1..22: note = Category: MG29-1 spacer used in sgRNA to target mouse albuminintron 1
  misc_feature 1..22: note = Description: mAlb29-1-16
  source 1..22: mol_type = other DNA
tagtaatggaagcctggtattt

SEQ ID NO: 4008 - DNA, 22 bp, synthetic construct
  misc_feature 1..22: note = Category: MG29-1 spacer used in sgRNA to target mouse albuminintron 1
  misc_feature 1..22: note = Description: mAlb29-1-17
  source 1..22: mol_type = other DNA
gtatctttgatgacaataatgg

SEQ ID NO: 4009 - DNA, 22 bp, synthetic construct
  misc_feature 1..22: note = Category: MG29-1 spacer used in sgRNA to target mouse albuminintron 1
  misc_feature 1..22: note = Description: mAlb29-1-18
  source 1..22: mol_type = other DNA
aagattgatgaagacaactaac

SEQ ID NO: 4010 - DNA, 22 bp, synthetic construct
  misc_feature 1..22: note = Category: MG29-1 spacer used in sgRNA to target mouse albuminintron 1
  misc_feature 1..22: note = Description: mAlb29-1-19
  source 1..22: mol_type = other DNA
ctctctgctacactcaaagtta

SEQ ID NO: 4011 - DNA, 22 bp, synthetic construct
  misc_feature 1..22: note = Category: MG29-1 spacer used in sgRNA to target mouse albuminintron 1
  misc_feature 1..22: note = Description: mAlb29-1-20
  source 1..22: mol_type = other DNA
aaacccgttaagtgtttatatc

SEQ ID NO: 4012-4030 - skipped (19 entries)

SEQ ID NO: 4031 - DNA, 18 bp, synthetic construct
  misc_feature 1..18: note = Category: Primers
  misc_feature 1..18: note = Description: mAlb90F
  source 1..18: mol_type = other DNA
ctcctcttcgtctccggc

SEQ ID NO: 4032 - DNA, 19 bp, synthetic construct
  misc_feature 1..19: note = Category: Primers
  misc_feature 1..19: note = Description: mAlb1073R
  source 1..19: mol_type = other DNA
ctgccacattgctcagcac

SEQ ID NO: 4033 - DNA, 22 bp, synthetic construct
  misc_feature 1..22: note = Category: MG29-1 spacer used in sgRNA to target human albuminintron 1
  misc_feature 1..22: note = Description: hAlb_g63
  source 1..22: mol_type = other DNA
gtaaactctgcatctttaaaga

SEQ ID NO: 4034 - DNA, 22 bp, synthetic construct
  misc_feature 1..22: note = Category: MG29-1 spacer used in sgRNA to target human albuminintron 1
  misc_feature 1..22: note = Description: hAlb_g59
  source 1..22: mol_type = other DNA
tttcaaaatattgggctctgat

SEQ ID NO: 4035 - DNA, 22 bp, synthetic construct
  misc_feature 1..22: note = Category: MG29-1 spacer used in sgRNA to target human albuminintron 1
  misc_feature 1..22: note = Description: hAlb_g58
  source 1..22: mol_type = other DNA
agtaaactctgcatctttaaag

SEQ ID NO: 4036 - DNA, 22 bp, synthetic construct
  misc_feature 1..22: note = Category: MG29-1 spacer used in sgRNA to target human albuminintron 1
  misc_feature 1..22: note = Description: hAlb_g56
  source 1..22: mol_type = other DNA
aagatgcagagtttactaaaac

SEQ ID NO: 4037 - DNA, 22 bp, synthetic construct
  misc_feature 1..22: note = Category: MG29-1 spacer used in sgRNA to target human albuminintron 1
  misc_feature 1..22: note = Description: hAlb_g72
  source 1..22: mol_type = other DNA
aaaatattgggctctgattcct

SEQ ID NO: 4038 - DNA, 22 bp, synthetic construct
  misc_feature 1..22: note = Category: MG29-1 spacer used in sgRNA to target human albuminintron 1
  misc_feature 1..22: note = Description: hAlb_g70
  source 1..22: mol_type = other DNA
aaataaagcatagtgcaatgga

SEQ ID NO: 4039 - DNA, 22 bp, synthetic construct
  misc_feature 1..22: note = Category: MG29-1 spacer used in sgRNA to target human albuminintron 1
  misc_feature 1..22: note = Description: hAlb_g74
  source 1..22: mol_type = other DNA
aataaagcatagtgcaatggat

SEQ ID NO: 4040 - DNA, 22 bp, synthetic construct
  misc_feature 1..22: note = Category: MG29-1 spacer used in sgRNA to target human albuminintron 1
  misc_feature 1..22: note = Description: hAlb_g83
  source 1..22: mol_type = other DNA
tgagatcaacagcacaggtttt

SEQ ID NO: 4041 - DNA, 22 bp, synthetic construct
  misc_feature 1..22: note = Category: MG29-1 spacer used in sgRNA to target human albuminintron 1
  misc_feature 1..22: note = Description: hAlb_g85
  source 1..22: mol_type = other DNA
tgtaggaatcagagcccaatat

SEQ ID NO: 4042 - DNA, 22 bp, synthetic construct
  misc_feature 1..22: note = Category: MG29-1 spacer used in sgRNA to target human albuminintron 1
  misc_feature 1..22: note = Description: hAlb_g89
  source 1..22: mol_type = other DNA
ctgtaggaatcagagcccaata

SEQ ID NO: 4043 - DNA, 22 bp, synthetic construct
  misc_feature 1..22: note = Category: MG29-1 spacer used in sgRNA to target human albuminintron 1
  misc_feature 1..22: note = Description: hAlb_g88
  source 1..22: mol_type = other DNA
tctgtaggaatcagagcccaat

SEQ ID NO: 4044 - DNA, 22 bp, synthetic construct
  misc_feature 1..22: note = Category: MG29-1 spacer used in sgRNA to target human albuminintron 1
  misc_feature 1..22: note = Description: hAlb_g77
  source 1..22: mol_type = other DNA
gtgactgtaattttcttttgcg

SEQ ID NO: 4045 - DNA, 22 bp, synthetic construct
  misc_feature 1..22: note = Category: MG29-1 spacer used in sgRNA to target human albuminintron 1
  misc_feature 1..22: note = Description: hAlb_g69
  source 1..22: mol_type = other DNA
cttttgcgcactaaggaaagtg

SEQ ID NO: 4046 - DNA, 22 bp, synthetic construct
  misc_feature 1..22: note = Category: MG29-1 spacer used in sgRNA to target human albuminintron 1
  misc_feature 1..22: note = Description: hAlb_g66
  source 1..22: mol_type = other DNA
tgaagtcttacaaggttatctt

SEQ ID NO: 4047 - DNA, 22 bp, synthetic construct
  misc_feature 1..22: note = Category: MG29-1 spacer used in sgRNA to target human albuminintron 1
  misc_feature 1..22: note = Description: hAlb_g75
  source 1..22: mol_type = other DNA
agtgtctatcaacagcaaccaa

SEQ ID NO: 4048 - DNA, 22 bp, synthetic construct
  misc_feature 1..22: note = Category: MG29-1 spacer used in sgRNA to target human albuminintron 1
  misc_feature 1..22: note = Description: hAlb_g79
  source 1..22: mol_type = other DNA
cttagtgcgcaaaagaaaatta

SEQ ID NO: 4049 - DNA, 22 bp, synthetic construct
  misc_feature 1..22: note = Category: MG29-1 spacer used in sgRNA to target human albuminintron 1
  misc_feature 1..22: note = Description: hAlb_g82
  source 1..22: mol_type = other DNA
tagccttatattcaaacttaga

SEQ ID NO: 4050 - DNA, 22 bp, synthetic construct
  misc_feature 1..22: note = Category: MG29-1 spacer used in sgRNA to target human albuminintron 1
  misc_feature 1..22: note = Description: hAlb_g80
  source 1..22: mol_type = other DNA
ggatagttatgaattcaatctt

SEQ ID NO: 4051 - DNA, 22 bp, synthetic construct
  misc_feature 1..22: note = Category: MG29-1 spacer used in sgRNA to target human albuminintron 1
  misc_feature 1..22: note = Description: hAlb_g84
  source 1..22: mol_type = other DNA
cactttccttagtgcgcaaaag

SEQ ID NO: 4052 - DNA, 22 bp, synthetic construct
  misc_feature 1..22: note = Category: MG29-1 spacer used in sgRNA to target human albuminintron 1
  misc_feature 1..22: note = Description: hAlb_g81
  source 1..22: mol_type = other DNA
gtatttgtgaagtcttacaagg

SEQ ID NO: 4053 - DNA, 22 bp, synthetic construct
  misc_feature 1..22: note = Category: MG29-1 spacer used in sgRNA to target human albuminintron 1
  misc_feature 1..22: note = Description: hAlb_g90
  source 1..22: mol_type = other DNA
gtgtctatcaacagcaaccaag

SEQ ID NO: 4054 - DNA, 22 bp, synthetic construct
  misc_feature 1..22: note = Category: MG29-1 spacer used in sgRNA to target human albuminintron 1
  misc_feature 1..22: note = Description: hAlb_g87
  source 1..22: mol_type = other DNA
cgcactaaggaaagtgcaaagt

SEQ ID NO: 4055 - DNA, 22 bp, synthetic construct
  misc_feature 1..22: note = Category: MG29-1 spacer used in sgRNA to target human albuminintron 1
  misc_feature 1..22: note = Description: hAlb_g86
  source 1..22: mol_type = other DNA
gcgcactaaggaaagtgcaaag

SEQ ID NO: 4056-4078 - skipped (23 entries)

SEQ ID NO: 4079 - DNA, 22 bp, synthetic construct
  misc_feature 1..22: note = Category: Primers
  misc_feature 1..22: note = Description: hAlb 11F
  source 1..22: mol_type = other DNA
tcttctgtcaaccccacacgcc

SEQ ID NO: 4080 - DNA, 20 bp, synthetic construct
  misc_feature 1..20: note = Category: Primers
  misc_feature 1..20: note = Description: hAlb834R
  source 1..20: mol_type = other DNA
cttgtctgggcaagggaaga

SEQ ID NO: 4081 - DNA, 22 bp, synthetic construct
  misc_feature 1..22: note = Category: MG29-1 spacer used in sgRNA to target mouse hao-1exons 1 to 4
  misc_feature 1..22: note = Description: mH29-1
  source 1..22: mol_type = other DNA
ccccagacctgtaatagtcata

SEQ ID NO: 4082 - DNA, 22 bp, synthetic construct
  misc_feature 1..22: note = Category: MG29-1 spacer used in sgRNA to target mouse hao-1exons 1 to 4
  misc_feature 1..22: note = Description: mH29-2
  source 1..22: mol_type = other DNA
aggacagagagtcagcatgcca

SEQ ID NO: 4083 - DNA, 22 bp, synthetic construct
  misc_feature 1..22: note = Category: MG29-1 spacer used in sgRNA to target mouse hao-1exons 1 to 4
  misc_feature 1..22: note = Description: mH29-3
  source 1..22: mol_type = other DNA
ggagacaacagtggacttgctg

SEQ ID NO: 4084 - DNA, 22 bp, synthetic construct
  misc_feature 1..22: note = Category: MG29-1 spacer used in sgRNA to target mouse hao-1exons 1 to 4
  misc_feature 1..22: note = Description: mH29-4
  source 1..22: mol_type = other DNA
ccctaccctgccacaatgttgc

SEQ ID NO: 4085 - DNA, 22 bp, synthetic construct
  misc_feature 1..22: note = Category: MG29-1 spacer used in sgRNA to target mouse hao-1exons 1 to 4
  misc_feature 1..22: note = Description: mH29-5
  source 1..22: mol_type = other DNA
cttacctagaaaatgcttggat

SEQ ID NO: 4086 - DNA, 22 bp, synthetic construct
  misc_feature 1..22: note = Category: MG29-1 spacer used in sgRNA to target mouse hao-1exons 1 to 4
  misc_feature 1..22: note = Description: mH29-6
  source 1..22: mol_type = other DNA
acagatcgatatcagcaacgtt

SEQ ID NO: 4087 - DNA, 22 bp, synthetic construct
  misc_feature 1..22: note = Category: MG29-1 spacer used in sgRNA to target mouse hao-1exons 1 to 4
  misc_feature 1..22: note = Description: mH29-7
  source 1..22: mol_type = other DNA
cgaagcatccgtggatagagct

SEQ ID NO: 4088 - DNA, 22 bp, synthetic construct
  misc_feature 1..22: note = Category: MG29-1 spacer used in sgRNA to target mouse hao-1exons 1 to 4
  misc_feature 1..22: note = Description: mH29-8
  source 1..22: mol_type = other DNA
ttgggctacctcctcaatagaa

SEQ ID NO: 4089 - DNA, 22 bp, synthetic construct
  misc_feature 1..22: note = Category: MG29-1 spacer used in sgRNA to target mouse hao-1exons 1 to 4
  misc_feature 1..22: note = Description: mH29-9
  source 1..22: mol_type = other DNA
aagctgccaccacaactcaggt

SEQ ID NO: 4090 - DNA, 22 bp, synthetic construct
  misc_feature 1..22: note = Category: MG29-1 spacer used in sgRNA to target mouse hao-1exons 1 to 4
  misc_feature 1..22: note = Description: mH29-10
  source 1..22: mol_type = other DNA
tggtggcagcttgaacctgttc

SEQ ID NO: 4091 - DNA, 22 bp, synthetic construct
  misc_feature 1..22: note = Category: MG29-1 spacer used in sgRNA to target mouse hao-1exons 1 to 4
  misc_feature 1..22: note = Description: mH29-11
  source 1..22: mol_type = other DNA
cgcacgtcatcaatgcggttgc

SEQ ID NO: 4092 - DNA, 22 bp, synthetic construct
  misc_feature 1..22: note = Category: MG29-1 spacer used in sgRNA to target mouse hao-1exons 1 to 4
  misc_feature 1..22: note = Description: mH29-12
  source 1..22: mol_type = other DNA
cccaggtaaggggtgtccacag

SEQ ID NO: 4093 - DNA, 22 bp, synthetic construct
  misc_feature 1..22: note = Category: MG29-1 spacer used in sgRNA to target mouse hao-1exons 1 to 4
  misc_feature 1..22: note = Description: mH29-13
  source 1..22: mol_type = other DNA
catccagcgaagtgcctctggg

SEQ ID NO: 4094 - DNA, 22 bp, synthetic construct
  misc_feature 1..22: note = Category: MG29-1 spacer used in sgRNA to target mouse hao-1exons 1 to 4
  misc_feature 1..22: note = Description: mH29-14
  source 1..22: mol_type = other DNA
aaattccagatggaagctctat

SEQ ID NO: 4095 - DNA, 22 bp, synthetic construct
  misc_feature 1..22: note = Category: MG29-1 spacer used in sgRNA to target mouse hao-1exons 1 to 4
  misc_feature 1..22: note = Description: mH29-15
  source 1..22: mol_type = other DNA
tgactgtggacaccccttacct

SEQ ID NO: 4096 - DNA, 22 bp, synthetic construct
  misc_feature 1..22: note = Category: MG29-1 spacer used in sgRNA to target mouse hao-1exons 1 to 4
  misc_feature 1..22: note = Description: mH29-16
  source 1..22: mol_type = other DNA
attacagcctgtcagaccatgg

SEQ ID NO: 4097 - DNA, 22 bp, synthetic construct
  misc_feature 1..22: note = Category: MG29-1 spacer used in sgRNA to target mouse hao-1exons 1 to 4
  misc_feature 1..22: note = Description: mH29-17
  source 1..22: mol_type = other DNA
gagacaacagtggacttgctga

SEQ ID NO: 4098 - DNA, 22 bp, synthetic construct
  misc_feature 1..22: note = Category: MG29-1 spacer used in sgRNA to target mouse hao-1exons 1 to 4
  misc_feature 1..22: note = Description: mH29-18
  source 1..22: mol_type = other DNA
caacaataggcagtgatgtcaa

SEQ ID NO: 4099 - DNA, 22 bp, synthetic construct
  misc_feature 1..22: note = Category: MG29-1 spacer used in sgRNA to target mouse hao-1exons 1 to 4
  misc_feature 1..22: note = Description: mH29-19
  source 1..22: mol_type = other DNA
cctcgactggtctgcatcagtg

SEQ ID NO: 4100 - DNA, 22 bp, synthetic construct
  misc_feature 1..22: note = Category: MG29-1 spacer used in sgRNA to target mouse hao-1exons 1 to 4
  misc_feature 1..22: note = Description: mH29-20
  source 1..22: mol_type = other DNA
ataatcactgatgcagaccagt

SEQ ID NO: 4101 - DNA, 22 bp, synthetic construct
  misc_feature 1..22: note = Category: MG29-1 spacer used in sgRNA to target mouse hao-1exons 1 to 4
  misc_feature 1..22: note = Description: mH29-21
  source 1..22: mol_type = other DNA
tcagctaacgtctcctgatcat

SEQ ID NO: 4102 - DNA, 22 bp, synthetic construct
  misc_feature 1..22: note = Category: MG29-1 spacer used in sgRNA to target mouse hao-1exons 1 to 4
  misc_feature 1..22: note = Description: mH29-22
  source 1..22: mol_type = other DNA
ctgatatcgatctgtcaacttc

SEQ ID NO: 4103 - DNA, 22 bp, synthetic construct
  misc_feature 1..22: note = Category: MG29-1 spacer used in sgRNA to target mouse hao-1exons 1 to 4
  misc_feature 1..22: note = Description: mH29-23
  source 1..22: mol_type = other DNA
taaagggcattttgagaggttt

SEQ ID NO: 4104 - DNA, 22 bp, synthetic construct
  misc_feature 1..22: note = Category: MG29-1 spacer used in sgRNA to target mouse hao-1exons 1 to 4
  misc_feature 1..22: note = Description: mH29-24
  source 1..22: mol_type = other DNA
aatagcaaagtttcttacctag

SEQ ID NO: 4105 - DNA, 22 bp, synthetic construct
  misc_feature 1..22: note = Category: MG29-1 spacer used in sgRNA to target mouse hao-1exons 1 to 4
  misc_feature 1..22: note = Description: mH29-25
  source 1..22: mol_type = other DNA
ggacagagagtcagcatgccaa

SEQ ID NO: 4106 - DNA, 22 bp, synthetic construct
  misc_feature 1..22: note = Category: MG29-1 spacer used in sgRNA to target mouse hao-1exons 1 to 4
  misc_feature 1..22: note = Description: mH29-26
  source 1..22: mol_type = other DNA
tccatttcattacagcctgtca

SEQ ID NO: 4107 - DNA, 22 bp, synthetic construct
  misc_feature 1..22: note = Category: MG29-1 spacer used in sgRNA to target mouse hao-1exons 1 to 4
  misc_feature 1..22: note = Description: mH29-27
  source 1..22: mol_type = other DNA
agtctgtgagatcatactgacc

SEQ ID NO: 4108 - DNA, 22 bp, synthetic construct
  misc_feature 1..22: note = Category: MG29-1 spacer used in sgRNA to target mouse hao-1exons 1 to 4
  misc_feature 1..22: note = Description: mH29-28
  source 1..22: mol_type = other DNA
tagatgtacagttgcatccagc

SEQ ID NO: 4109 - DNA, 22 bp, synthetic construct
  misc_feature 1..22: note = Category: MG29-1 spacer used in sgRNA to target mouse hao-1exons 1 to 4
  misc_feature 1..22: note = Description: mH29-29
  source 1..22: mol_type = other DNA
ccttaggagaaaatgccaaatc

SEQ ID NO: 4110 - DNA, 22 bp, synthetic construct
  misc_feature 1..22: note = Category: MG29-1 spacer used in sgRNA to target mouse hao-1exons 1 to 4
  misc_feature 1..22: note = Description: mH29-30
  source 1..22: mol_type = other DNA
ctcctaagggaaattttggaga

SEQ ID NO: 4111 - DNA, 22 bp, synthetic construct
  misc_feature 1..22: note = Category: MG29-1 spacer used in sgRNA to target mouse hao-1exons 1 to 4
  misc_feature 1..22: note = Description: mH29-31
  source 1..22: mol_type = other DNA
gctgataacatccaagcatttt

SEQ ID NO: 4112 - DNA, 22 bp, synthetic construct
  misc_feature 1..22: note = Category: MG29-1 spacer used in sgRNA to target mouse hao-1exons 1 to 4
  misc_feature 1..22: note = Description: mH29-32
  source 1..22: mol_type = other DNA
aaatagcaaagtttcttaccta

SEQ ID NO: 4113 - DNA, 22 bp, synthetic construct
  misc_feature 1..22: note = Category: MG29-1 spacer used in sgRNA to target mouse hao-1exons 1 to 4
  misc_feature 1..22: note = Description: mH29-33
  source 1..22: mol_type = other DNA
taggacagagagtcagcatgcc

SEQ ID NO: 4114 - DNA, 22 bp, synthetic construct
  misc_feature 1..22: note = Category: MG29-1 spacer used in sgRNA to target mouse hao-1exons 1 to 4
  misc_feature 1..22: note = Description: mH29-34
  source 1..22: mol_type = other DNA
gggctactgccatgcagtgcat

SEQ ID NO: 4115 - DNA, 22 bp, synthetic construct
  misc_feature 1..22: note = Category: MG29-1 spacer used in sgRNA to target mouse hao-1exons 1 to 4
  misc_feature 1..22: note = Description: mH29-35
  source 1..22: mol_type = other DNA
tctccaaaatttcccttaggag

SEQ ID NO: 4116 - DNA, 22 bp, synthetic construct
  misc_feature 1..22: note = Category: MG29-1 spacer used in sgRNA to target mouse hao-1exons 1 to 4
  misc_feature 1..22: note = Description: mH29-36
  source 1..22: mol_type = other DNA
aattccagatggaagctctatc

SEQ ID NO: 4117 - DNA, 22 bp, synthetic construct
  misc_feature 1..22: note = Category: MG29-1 spacer used in sgRNA to target mouse hao-1exons 1 to 4
  misc_feature 1..22: note = Description: mH29-37
  source 1..22: mol_type = other DNA
tcctaagggaaattttggagac

SEQ ID NO: 4118 - DNA, 22 bp, synthetic construct
  misc_feature 1..22: note = Category: MG29-1 spacer used in sgRNA to target mouse hao-1exons 1 to 4
  misc_feature 1..22: note = Description: mH29-38
  source 1..22: mol_type = other DNA
ttacctagaaaatgcttggatg

SEQ ID NO: 4119 - DNA, 22 bp, synthetic construct
  misc_feature 1..22: note = Category: MG29-1 spacer used in sgRNA to target mouse hao-1exons 1 to 4
  misc_feature 1..22: note = Description: mH29-39
  source 1..22: mol_type = other DNA
caaggccatatttgtgactgtg

SEQ ID NO: 4120 - DNA, 22 bp, synthetic construct
  misc_feature 1..22: note = Category: MG29-1 spacer used in sgRNA to target mouse hao-1exons 1 to 4
  misc_feature 1..22: note = Description: mH29-40
  source 1..22: mol_type = other DNA
ctccatttcattacagcctgtc

SEQ ID NO: 4121 - DNA, 22 bp, synthetic construct
  misc_feature 1..22: note = Category: MG29-1 spacer used in sgRNA to target mouse hao-1exons 1 to 4
  misc_feature 1..22: note = Description: mH29-41
  source 1..22: mol_type = other DNA
gcattttctcctaagggaaatt

SEQ ID NO: 4122 - DNA, 22 bp, synthetic construct
  misc_feature 1..22: note = Category: MG29-1 spacer used in sgRNA to target mouse hao-1exons 1 to 4
  misc_feature 1..22: note = Description: mH29-42
  source 1..22: mol_type = other DNA
ttacctcgcacagtggccagct

SEQ ID NO: 4123 - DNA, 22 bp, synthetic construct
  misc_feature 1..22: note = Category: MG29-1 spacer used in sgRNA to target mouse hao-1exons 1 to 4
  misc_feature 1..22: note = Description: mH29-43
  source 1..22: mol_type = other DNA
tctctcttttcttacctcgcac

SEQ ID NO: 4124 - DNA, 22 bp, synthetic construct
  misc_feature 1..22: note = Category: MG29-1 spacer used in sgRNA to target mouse hao-1exons 1 to 4
  misc_feature 1..22: note = Description: mH29-44
  source 1..22: mol_type = other DNA
cttacctcgcacagtggccagc

SEQ ID NO: 4125 - DNA, 22 bp, synthetic construct
  misc_feature 1..22: note = Category: MG29-1 spacer used in sgRNA to target mouse hao-1exons 1 to 4
  misc_feature 1..22: note = Description: mH29-45
  source 1..22: mol_type = other DNA
aaaccaatgatttggcattttc

SEQ ID NO: 4126-4170 - skipped (45 entries)

SEQ ID NO: 4171 - DNA, 20 bp, synthetic construct
  misc_feature 1..20: note = Category: Primers
  misc_feature 1..20: note = Description: PCR_mHE1_F_+233
  source 1..20: mol_type = other DNA
gtgaccaaccctacccgttt

SEQ ID NO: 4172 - DNA, 20 bp, synthetic construct
  misc_feature 1..20: note = Category: Primers
  misc_feature 1..20: note = Description: PCR_mHE1_R_-553
  source 1..20: mol_type = other DNA
gcaagcacctactgtctcgt

SEQ ID NO: 4173 - DNA, 20 bp, synthetic construct
  misc_feature 1..20: note = Category: Primers
  misc_feature 1..20: note = Description: HAO1_E2_F5721
  source 1..20: mol_type = other DNA
caacgaaggttccctccagg

SEQ ID NO: 4174 - DNA, 20 bp, synthetic construct
  misc_feature 1..20: note = Category: Primers
  misc_feature 1..20: note = Description: HAO1_E2_R6271
  source 1..20: mol_type = other DNA
ggaagggtgttcgagaagga

SEQ ID NO: 4175 - DNA, 20 bp, synthetic construct
  misc_feature 1..20: note = Category: Primers
  misc_feature 1..20: note = Description: HAO1_E3_F23198
  source 1..20: mol_type = other DNA
tgccctagacaagctgacac

SEQ ID NO: 4176 - DNA, 20 bp, synthetic construct
  misc_feature 1..20: note = Category: Primers
  misc_feature 1..20: note = Description: HAO1_E3_R23879
  source 1..20: mol_type = other DNA
cagattctggaagtggccca

SEQ ID NO: 4177 - DNA, 20 bp, synthetic construct
  misc_feature 1..20: note = Category: Primers
  misc_feature 1..20: note = Description: HAO1_E4_F31087
  source 1..20: mol_type = other DNA
cctgtaggtggctgagtacg

SEQ ID NO: 4178 - DNA, 20 bp, synthetic construct
  misc_feature 1..20: note = Category: Primers
  misc_feature 1..20: note = Description: HAO1_E4_R31650
  source 1..20: mol_type = other DNA
aggtttggttcccctcacct

SEQ ID NO: 4179 - DNA, 24 bp, synthetic construct
  misc_feature 1..24: note = Category: Primers
  misc_feature 1..24: note = Description: Seq_mHE1_F_+139
  source 1..24: mol_type = other DNA
gtctaggcatacaatgtttgctca

SEQ ID NO: 4180 - DNA, 23 bp, synthetic construct
  misc_feature 1..23: note = Category: Primers
  misc_feature 1..23: note = Description: 5938F Seq_HAO1_E2
  source 1..23: mol_type = other DNA
ctatgcaaggaaaagatttggcc

SEQ ID NO: 4181 - DNA, 23 bp, synthetic construct
  misc_feature 1..23: note = Category: Primers
  misc_feature 1..23: note = Description: HAO1_E3_F23476
  source 1..23: mol_type = other DNA
tcttcccccttgaatgaaacact

SEQ ID NO: 4182 - DNA, 20 bp, synthetic construct
  misc_feature 1..20: note = Category: Primers
  misc_feature 1..20: note = Description: HAO1_E3_R23879
  source 1..20: mol_type = other DNA
cagattctggaagtggccca

SEQ ID NO: 4183 - DNA, 20 bp, synthetic construct
  misc_feature 1..20: note = Category: Primers
  misc_feature 1..20: note = Description: HAO1_E4_R31650
  source 1..20: mol_type = other DNA
aggtttggttcccctcacct

SEQ ID NO: 4184 - DNA, 22 bp, synthetic construct
  misc_feature 1..22: note = Category: MG29-1 spacer sequences identified in exons 1 to 4 ofthe human hao-1 gene
  misc_feature 1..22: note = Description: hH29-1
  source 1..22: mol_type = other DNA
gcatgttgttcataatcattga

SEQ ID NO: 4185 - DNA, 22 bp, synthetic construct
  misc_feature 1..22: note = Category: MG29-1 spacer sequences identified in exons 1 to 4 ofthe human hao-1 gene
  misc_feature 1..22: note = Description: hH29-2
  source 1..22: mol_type = other DNA
gaagtactgatttagcatgttg

SEQ ID NO: 4186 - DNA, 22 bp, synthetic construct
  misc_feature 1..22: note = Category: MG29-1 spacer sequences identified in exons 1 to 4 ofthe human hao-1 gene
  misc_feature 1..22: note = Description: hH29-3
  source 1..22: mol_type = other DNA
tatcaatgattatgaacaacat

SEQ ID NO: 4187 - DNA, 22 bp, synthetic construct
  misc_feature 1..22: note = Category: MG29-1 spacer sequences identified in exons 1 to 4 ofthe human hao-1 gene
  misc_feature 1..22: note = Description: hH29-4
  source 1..22: mol_type = other DNA
ccccagacctgtaatagtcata

SEQ ID NO: 4188 - DNA, 22 bp, synthetic construct
  misc_feature 1..22: note = Category: MG29-1 spacer sequences identified in exons 1 to 4 ofthe human hao-1 gene
  misc_feature 1..22: note = Description: hH29-5
  source 1..22: mol_type = other DNA
ttcatcatttgccccagacctg

SEQ ID NO: 4189 - DNA, 22 bp, synthetic construct
  misc_feature 1..22: note = Category: MG29-1 spacer sequences identified in exons 1 to 4 ofthe human hao-1 gene
  misc_feature 1..22: note = Description: hH29-6
  source 1..22: mol_type = other DNA
ttacctggaaaatgctgcaata

SEQ ID NO: 4190 - DNA, 22 bp, synthetic construct
  misc_feature 1..22: note = Category: MG29-1 spacer sequences identified in exons 1 to 4 ofthe human hao-1 gene
  misc_feature 1..22: note = Description: hH29-7
  source 1..22: mol_type = other DNA
cttacctggaaaatgctgcaat

SEQ ID NO: 4191 - DNA, 22 bp, synthetic construct
  misc_feature 1..22: note = Category: MG29-1 spacer sequences identified in exons 1 to 4 ofthe human hao-1 gene
  misc_feature 1..22: note = Description: hH29-8
  source 1..22: mol_type = other DNA
gctgataatattgcagcatttt

SEQ ID NO: 4192 - DNA, 22 bp, synthetic construct
  misc_feature 1..22: note = Category: MG29-1 spacer sequences identified in exons 1 to 4 ofthe human hao-1 gene
  misc_feature 1..22: note = Description: hH29-9
  source 1..22: mol_type = other DNA
aaaaataaattttcttacctgg

SEQ ID NO: 4193 - DNA, 22 bp, synthetic construct
  misc_feature 1..22: note = Category: MG29-1 spacer sequences identified in exons 1 to 4 ofthe human hao-1 gene
  misc_feature 1..22: note = Description: hH29-10
  source 1..22: mol_type = other DNA
aaaaaataaattttcttacctg

SEQ ID NO: 4194 - DNA, 22 bp, synthetic construct
  misc_feature 1..22: note = Category: MG29-1 spacer sequences identified in exons 1 to 4 ofthe human hao-1 gene
  misc_feature 1..22: note = Description: hH29-11
  source 1..22: mol_type = other DNA
attttattttttaattctagat

SEQ ID NO: 4195 - DNA, 22 bp, synthetic construct
  misc_feature 1..22: note = Category: MG29-1 spacer sequences identified in exons 1 to 4 ofthe human hao-1 gene
  misc_feature 1..22: note = Description: hH29-12
  source 1..22: mol_type = other DNA
ttttattttttaattctagatg

SEQ ID NO: 4196 - DNA, 22 bp, synthetic construct
  misc_feature 1..22: note = Category: MG29-1 spacer sequences identified in exons 1 to 4 ofthe human hao-1 gene
  misc_feature 1..22: note = Description: hH29-13
  source 1..22: mol_type = other DNA
attttttaattctagatggaag

SEQ ID NO: 4197 - DNA, 22 bp, synthetic construct
  misc_feature 1..22: note = Category: MG29-1 spacer sequences identified in exons 1 to 4 ofthe human hao-1 gene
  misc_feature 1..22: note = Description: hH29-14
  source 1..22: mol_type = other DNA
ttttttaattctagatggaagc

SEQ ID NO: 4198 - DNA, 22 bp, synthetic construct
  misc_feature 1..22: note = Category: MG29-1 spacer sequences identified in exons 1 to 4 ofthe human hao-1 gene
  misc_feature 1..22: note = Description: hH29-15
  source 1..22: mol_type = other DNA
ttaattctagatggaagctgta

SEQ ID NO: 4199 - DNA, 22 bp, synthetic construct
  misc_feature 1..22: note = Category: MG29-1 spacer sequences identified in exons 1 to 4 ofthe human hao-1 gene
  misc_feature 1..22: note = Description: hH29-16
  source 1..22: mol_type = other DNA
taattctagatggaagctgtat

SEQ ID NO: 4200 - DNA, 22 bp, synthetic construct
  misc_feature 1..22: note = Category: MG29-1 spacer sequences identified in exons 1 to 4 ofthe human hao-1 gene
  misc_feature 1..22: note = Description: hH29-17
  source 1..22: mol_type = other DNA
aattctagatggaagctgtatc

SEQ ID NO: 4201 - DNA, 22 bp, synthetic construct
  misc_feature 1..22: note = Category: MG29-1 spacer sequences identified in exons 1 to 4 ofthe human hao-1 gene
  misc_feature 1..22: note = Description: hH29-18
  source 1..22: mol_type = other DNA
attctagatggaagctgtatcc

SEQ ID NO: 4202 - DNA, 22 bp, synthetic construct
  misc_feature 1..22: note = Category: MG29-1 spacer sequences identified in exons 1 to 4 ofthe human hao-1 gene
  misc_feature 1..22: note = Description: hH29-19
  source 1..22: mol_type = other DNA
agcaacattccggagcatcctt

SEQ ID NO: 4203 - DNA, 22 bp, synthetic construct
  misc_feature 1..22: note = Category: MG29-1 spacer sequences identified in exons 1 to 4 ofthe human hao-1 gene
  misc_feature 1..22: note = Description: hH29-20
  source 1..22: mol_type = other DNA
aggacagagggtcagcatgcca

SEQ ID NO: 4204 - DNA, 22 bp, synthetic construct
  misc_feature 1..22: note = Category: MG29-1 spacer sequences identified in exons 1 to 4 ofthe human hao-1 gene
  misc_feature 1..22: note = Description: hH29-21
  source 1..22: mol_type = other DNA
ggacagagggtcagcatgccaa

SEQ ID NO: 4205 - DNA, 22 bp, synthetic construct
  misc_feature 1..22: note = Category: MG29-1 spacer sequences identified in exons 1 to 4 ofthe human hao-1 gene
  misc_feature 1..22: note = Description: hH29-22
  source 1..22: mol_type = other DNA
tttctcagcctgtcagtccctg

SEQ ID NO: 4206 - DNA, 22 bp, synthetic construct
  misc_feature 1..22: note = Category: MG29-1 spacer sequences identified in exons 1 to 4 ofthe human hao-1 gene
  misc_feature 1..22: note = Description: hH29-23
  source 1..22: mol_type = other DNA
tcagcctgtcagtccctgggaa

SEQ ID NO: 4207 - DNA, 22 bp, synthetic construct
  misc_feature 1..22: note = Category: MG29-1 spacer sequences identified in exons 1 to 4 ofthe human hao-1 gene
  misc_feature 1..22: note = Description: hH29-24
  source 1..22: mol_type = other DNA
tgacagtggacacaccttacct

SEQ ID NO: 4208 - DNA, 22 bp, synthetic construct
  misc_feature 1..22: note = Category: MG29-1 spacer sequences identified in exons 1 to 4 ofthe human hao-1 gene
  misc_feature 1..22: note = Description: hH29-25
  source 1..22: mol_type = other DNA
aatctgttacgcacatcatcca

SEQ ID NO: 4209 - DNA, 22 bp, synthetic construct
  misc_feature 1..22: note = Category: MG29-1 spacer sequences identified in exons 1 to 4 ofthe human hao-1 gene
  misc_feature 1..22: note = Description: hH29-26
  source 1..22: mol_type = other DNA
atgcatttcttattttaggatg

SEQ ID NO: 4210 - DNA, 22 bp, synthetic construct
  misc_feature 1..22: note = Category: MG29-1 spacer sequences identified in exons 1 to 4 ofthe human hao-1 gene
  misc_feature 1..22: note = Description: hH29-27
  source 1..22: mol_type = other DNA
tgcatttcttattttaggatga

SEQ ID NO: 4211 - DNA, 22 bp, synthetic construct
  misc_feature 1..22: note = Category: MG29-1 spacer sequences identified in exons 1 to 4 ofthe human hao-1 gene
  misc_feature 1..22: note = Description: hH29-28
  source 1..22: mol_type = other DNA
ttattttaggatgaaaaatttt

SEQ ID NO: 4212 - DNA, 22 bp, synthetic construct
  misc_feature 1..22: note = Category: MG29-1 spacer sequences identified in exons 1 to 4 ofthe human hao-1 gene
  misc_feature 1..22: note = Description: hH29-29
  source 1..22: mol_type = other DNA
aggatgaaaaattttgaaacca

SEQ ID NO: 4213 - DNA, 22 bp, synthetic construct
  misc_feature 1..22: note = Category: MG29-1 spacer sequences identified in exons 1 to 4 ofthe human hao-1 gene
  misc_feature 1..22: note = Description: hH29-30
  source 1..22: mol_type = other DNA
ggatgaaaaattttgaaaccag

SEQ ID NO: 4214 - DNA, 22 bp, synthetic construct
  misc_feature 1..22: note = Category: MG29-1 spacer sequences identified in exons 1 to 4 ofthe human hao-1 gene
  misc_feature 1..22: note = Description: hH29-31
  source 1..22: mol_type = other DNA
ctcaggagaaaatgataaagta

SEQ ID NO: 4215 - DNA, 22 bp, synthetic construct
  misc_feature 1..22: note = Category: MG29-1 spacer sequences identified in exons 1 to 4 ofthe human hao-1 gene
  misc_feature 1..22: note = Description: hH29-32
  source 1..22: mol_type = other DNA
cctcaggagaaaatgataaagt

SEQ ID NO: 4216 - DNA, 22 bp, synthetic construct
  misc_feature 1..22: note = Category: MG29-1 spacer sequences identified in exons 1 to 4 ofthe human hao-1 gene
  misc_feature 1..22: note = Description: hH29-33
  source 1..22: mol_type = other DNA
gaaaccagtactttatcatttt

SEQ ID NO: 4217 - DNA, 22 bp, synthetic construct
  misc_feature 1..22: note = Category: MG29-1 spacer sequences identified in exons 1 to 4 ofthe human hao-1 gene
  misc_feature 1..22: note = Description: hH29-34
  source 1..22: mol_type = other DNA
aaaccagtactttatcattttc

SEQ ID NO: 4218 - DNA, 22 bp, synthetic construct
  misc_feature 1..22: note = Category: MG29-1 spacer sequences identified in exons 1 to 4 ofthe human hao-1 gene
  misc_feature 1..22: note = Description: hH29-35
  source 1..22: mol_type = other DNA
tcattttctcctgaggaaaatt

SEQ ID NO: 4219 - DNA, 22 bp, synthetic construct
  misc_feature 1..22: note = Category: MG29-1 spacer sequences identified in exons 1 to 4 ofthe human hao-1 gene
  misc_feature 1..22: note = Description: hH29-36
  source 1..22: mol_type = other DNA
ctcctgaggaaaattttggaga

SEQ ID NO: 4220 - DNA, 22 bp, synthetic construct
  misc_feature 1..22: note = Category: MG29-1 spacer sequences identified in exons 1 to 4 ofthe human hao-1 gene
  misc_feature 1..22: note = Description: hH29-37
  source 1..22: mol_type = other DNA
tcctgaggaaaattttggagac

SEQ ID NO: 4221 - DNA, 22 bp, synthetic construct
  misc_feature 1..22: note = Category: MG29-1 spacer sequences identified in exons 1 to 4 ofthe human hao-1 gene
  misc_feature 1..22: note = Description: hH29-38
  source 1..22: mol_type = other DNA
gccacatatgcagcaagtccac

SEQ ID NO: 4222 - DNA, 22 bp, synthetic construct
  misc_feature 1..22: note = Category: MG29-1 spacer sequences identified in exons 1 to 4 ofthe human hao-1 gene
  misc_feature 1..22: note = Description: hH29-39
  source 1..22: mol_type = other DNA
ggagacgacagtggacttgctg

SEQ ID NO: 4223 - DNA, 22 bp, synthetic construct
  misc_feature 1..22: note = Category: MG29-1 spacer sequences identified in exons 1 to 4 ofthe human hao-1 gene
  misc_feature 1..22: note = Description: hH29-40
  source 1..22: mol_type = other DNA
gagacgacagtggacttgctgc

SEQ ID NO: 4224 - DNA, 22 bp, synthetic construct
  misc_feature 1..22: note = Category: MG29-1 spacer sequences identified in exons 1 to 4 ofthe human hao-1 gene
  misc_feature 1..22: note = Description: hH29-41
  source 1..22: mol_type = other DNA
atatcttcccagctgatagatg

SEQ ID NO: 4225 - DNA, 22 bp, synthetic construct
  misc_feature 1..22: note = Category: MG29-1 spacer sequences identified in exons 1 to 4 ofthe human hao-1 gene
  misc_feature 1..22: note = Description: hH29-42
  source 1..22: mol_type = other DNA
caacaattggcaatgatgtcag

SEQ ID NO: 4226-4267 - skipped (42 entries)

SEQ ID NO: 4268 - DNA, 22 bp, synthetic construct
  misc_feature 1..22: note = Category: TRAC spacer
  misc_feature 1..22: note = Description: Guide 35 TRAC spacer
  source 1..22: mol_type = other DNA
gagtctctcagctggtacacgg

SEQ ID NO: 4269 - DNA, 20 bp, synthetic construct
  misc_feature 1..20: note = Category: Primers
  misc_feature 1..20: note = Description: Primer F
  source 1..20: mol_type = other DNA
tgctttgctgggcctttttc

SEQ ID NO: 4270 - DNA, 20 bp, synthetic construct
  misc_feature 1..20: note = Category: Primers
  misc_feature 1..20: note = Description: Primer R
  source 1..20: mol_type = other DNA
acagtctgagcaaaggcagg

SEQ ID NO: 4271 - DNA, 20 bp, synthetic construct
  misc_feature 1..20: note = Category: Primers
  misc_feature 1..20: note = Description: Primer for Sanger sequencing
  source 1..20: mol_type = other DNA
atcacgagcagctggtttct

SEQ ID NO: 4272 - RNA, 44 nt, synthetic construct
  misc_feature 1..44: note = Category: Chemically modified MG29-1 sgRNA
  misc_feature 1..44: note = Description: mAlb298-0
  source 1..44: mol_type = other RNA
cttaatttctactgttgtagatctgtaacgatcgggaactggca

SEQ ID NO: 4273 - RNA, 44 nt, synthetic construct; identical to SEQ ID NO: 4272
  misc_feature 1..44: note = Category: Chemically modified MG29-1 sgRNA
  misc_feature 1..44: note = Description: mAlb298-1
  source 1..44: mol_type = other RNA

SEQ ID NO: 4274 - RNA, 44 nt, synthetic construct; identical to SEQ ID NO: 4272
  misc_feature 1..44: note = Category: Chemically modified MG29-1 sgRNA
  misc_feature 1..44: note = Description: mAlb298-2
  source 1..44: mol_type = other RNA

SEQ ID NO: 4275 - RNA, 44 nt, synthetic construct; identical to SEQ ID NO: 4272
  misc_feature 1..44: note = Category: Chemically modified MG29-1 sgRNA
  misc_feature 1..44: note = Description: mAlb298-3
  source 1..44: mol_type = other RNA

SEQ ID NO: 4276 - RNA, 44 nt, synthetic construct; identical to SEQ ID NO: 4272
  misc_feature 1..44: note = Category: Chemically modified MG29-1 sgRNA
  misc_feature 1..44: note = Description: mAlb298-4
  source 1..44: mol_type = other RNA

SEQ ID NO: 4277 - RNA, 44 nt, synthetic construct; identical to SEQ ID NO: 4272
  misc_feature 1..44: note = Category: Chemically modified MG29-1 sgRNA
  misc_feature 1..44: note = Description: mAlb298-5
  source 1..44: mol_type = other RNA

SEQ ID NO: 4278 - RNA, 44 nt, synthetic construct; identical to SEQ ID NO: 4272
  misc_feature 1..44: note = Category: Chemically modified MG29-1 sgRNA
  misc_feature 1..44: note = Description: mAlb298-6
  source 1..44: mol_type = other RNA

SEQ ID NO: 4279 - RNA, 44 nt, synthetic construct; identical to SEQ ID NO: 4272
  misc_feature 1..44: note = Category: Chemically modified MG29-1 sgRNA
  misc_feature 1..44: note = Description: mAlb298-7
  source 1..44: mol_type = other RNA

SEQ ID NO: 4280 - RNA, 44 nt, synthetic construct; identical to SEQ ID NO: 4272
  misc_feature 1..44: note = Category: Chemically modified MG29-1 sgRNA
  misc_feature 1..44: note = Description: mAlb298-8
  source 1..44: mol_type = other RNA

SEQ ID NO: 4281 - RNA, 44 nt, synthetic construct; identical to SEQ ID NO: 4272
  misc_feature 1..44: note = Category: Chemically modified MG29-1 sgRNA
  misc_feature 1..44: note = Description: mAlb298-9
  source 1..44: mol_type = other RNA

SEQ ID NO: 4282 - RNA, 44 nt, synthetic construct; identical to SEQ ID NO: 4272
  misc_feature 1..44: note = Category: Chemically modified MG29-1 sgRNA
  misc_feature 1..44: note = Description: mAlb298-10
  source 1..44: mol_type = other RNA

SEQ ID NO: 4283 - RNA, 44 nt, synthetic construct; identical to SEQ ID NO: 4272
  misc_feature 1..44: note = Category: Chemically modified MG29-1 sgRNA
  misc_feature 1..44: note = Description: mAlb298-11
  source 1..44: mol_type = other RNA

SEQ ID NO: 4284 - RNA, 44 nt, synthetic construct; identical to SEQ ID NO: 4272
  misc_feature 1..44: note = Category: Chemically modified MG29-1 sgRNA
  misc_feature 1..44: note = Description: mAlb298-12
  source 1..44: mol_type = other RNA

SEQ ID NO: 4285 - RNA, 44 nt, synthetic construct; identical to SEQ ID NO: 4272
  misc_feature 1..44: note = Category: Chemically modified MG29-1 sgRNA
  misc_feature 1..44: note = Description: mAlb298-13
  source 1..44: mol_type = other RNA

SEQ ID NO: 4286 - RNA, 44 nt, synthetic construct; identical to SEQ ID NO: 4272
  misc_feature 1..44: note = Category: Chemically modified MG29-1 sgRNA
  misc_feature 1..44: note = Description: mAlb298-14
  source 1..44: mol_type = other RNA

SEQ ID NO: 4287 - RNA, 44 nt, synthetic construct; identical to SEQ ID NO: 4272
  misc_feature 1..44: note = Category: Chemically modified MG29-1 sgRNA
  misc_feature 1..44: note = Description: mAlb298-15
  source 1..44: mol_type = other RNA

SEQ ID NO: 4288 - RNA, 44 nt, synthetic construct; identical to SEQ ID NO: 4272
  misc_feature 1..44: note = Category: Chemically modified MG29-1 sgRNA
  misc_feature 1..44: note = Description: mAlb298-16
  source 1..44: mol_type = other RNA

SEQ ID NO: 4289 - RNA, 44 nt, synthetic construct; identical to SEQ ID NO: 4272
  misc_feature 1..44: note = Category: Chemically modified MG29-1 sgRNA
  misc_feature 1..44: note = Description: mAlb298-17
  source 1..44: mol_type = other RNA

SEQ ID NO: 4290 - RNA, 44 nt, synthetic construct; identical to SEQ ID NO: 4272
  misc_feature 1..44: note = Category: Chemically modified MG29-1 sgRNA
  misc_feature 1..44: note = Description: mAlb298-18
  source 1..44: mol_type = other RNA

SEQ ID NO: 4291 - RNA, 48 nt, synthetic construct
  misc_feature 1..48: note = Category: Chemically modified MG29-1 sgRNA
  misc_feature 1..48: note = Description: mAlb298-19
  source 1..48: mol_type = other RNA
gtagcttaatttctactgttgtagatctgtaacgatcgggaactggca

SEQ ID NO: 4292 - RNA, 44 nt, synthetic construct; identical to SEQ ID NO: 4272
  misc_feature 1..44: note = Category: Chemically modified MG29-1 sgRNA
  misc_feature 1..44: note = Description: mAlb298-20
  source 1..44: mol_type = other RNA

SEQ ID NO: 4293 - RNA, 44 nt, synthetic construct; identical to SEQ ID NO: 4272
  misc_feature 1..44: note = Category: Chemically modified MG29-1 sgRNA
  misc_feature 1..44: note = Description: mAlb298-21
  source 1..44: mol_type = other RNA

SEQ ID NO: 4294 - RNA, 44 nt, synthetic construct; identical to SEQ ID NO: 4272
  misc_feature 1..44: note = Category: Chemically modified MG29-1 sgRNA
  misc_feature 1..44: note = Description: mAlb298-22
  source 1..44: mol_type = other RNA

SEQ ID NO: 4295 - RNA, 44 nt, synthetic construct; identical to SEQ ID NO: 4272
  misc_feature 1..44: note = Category: Chemically modified MG29-1 sgRNA
  misc_feature 1..44: note = Description: mAlb298-23
  source 1..44: mol_type = other RNA

SEQ ID NO: 4296 - RNA, 44 nt, synthetic construct; identical to SEQ ID NO: 4272
  misc_feature 1..44: note = Category: Chemically modified MG29-1 sgRNA
  misc_feature 1..44: note = Description: mAlb298-24
  source 1..44: mol_type = other RNA

SEQ ID NO: 4297 - RNA, 44 nt, synthetic construct; identical to SEQ ID NO: 4272
  misc_feature 1..44: note = Category: Chemically modified MG29-1 sgRNA
  misc_feature 1..44: note = Description: mAlb298-25
  source 1..44: mol_type = other RNA

SEQ ID NO: 4298 - RNA, 44 nt, synthetic construct; identical to SEQ ID NO: 4272
  misc_feature 1..44: note = Category: Chemically modified MG29-1 sgRNA
  misc_feature 1..44: note = Description: mAlb298-26
  source 1..44: mol_type = other RNA

SEQ ID NO: 4299 - RNA, 46 nt, synthetic construct
  misc_feature 1..46: note = Category: Chemically modified MG29-1 sgRNA
  misc_feature 1..46: note = Description: mAlb298-27
  source 1..46: mol_type = other RNA
cttttaatttctactgttgtagatctgtaacgatcgggaactggca

SEQ ID NO: 4300 - RNA, 46 nt, synthetic construct; identical to SEQ ID NO: 4299
  misc_feature 1..46: note = Category: Chemically modified MG29-1 sgRNA
  misc_feature 1..46: note = Description: mAlb298-28
  source 1..46: mol_type = other RNA

SEQ ID NO: 4301 - RNA, 46 nt, synthetic construct; identical to SEQ ID NO: 4299
  misc_feature 1..46: note = Category: Chemically modified MG29-1 sgRNA
  misc_feature 1..46: note = Description: mAlb298-29
  source 1..46: mol_type = other RNA

SEQ ID NO: 4302 - RNA, 46 nt, synthetic construct; identical to SEQ ID NO: 4299
  misc_feature 1..46: note = Category: Chemically modified MG29-1 sgRNA
  misc_feature 1..46: note = Description: mAlb298-30
  source 1..46: mol_type = other RNA

SEQ ID NO: 4303 - RNA, 44 nt, synthetic construct; identical to SEQ ID NO: 4272
  misc_feature 1..44: note = Category: Chemically modified MG29-1 sgRNA
  misc_feature 1..44: note = Description: mAlb298-31
  source 1..44: mol_type = other RNA

SEQ ID NO: 4304 - RNA, 44 nt, synthetic construct; identical to SEQ ID NO: 4272
  misc_feature 1..44: note = Category: Chemically modified MG29-1 sgRNA
  misc_feature 1..44: note = Description: mAlb298-32
  source 1..44: mol_type = other RNA

SEQ ID NO: 4305 - RNA, 44 nt, synthetic construct; identical to SEQ ID NO: 4272
  misc_feature 1..44: note = Category: Chemically modified MG29-1 sgRNA
  misc_feature 1..44: note = Description: mAlb298-33
  source 1..44: mol_type = other RNA

SEQ ID NO: 4306 - RNA, 44 nt, synthetic construct; identical to SEQ ID NO: 4272
  misc_feature 1..44: note = Category: Chemically modified MG29-1 sgRNA
  misc_feature 1..44: note = Description: mAlb298-34
  source 1..44: mol_type = other RNA

SEQ ID NO: 4307 - RNA, 44 nt, synthetic construct; identical to SEQ ID NO: 4272
  misc_feature 1..44: note = Category: Chemically modified MG29-1 sgRNA
  misc_feature 1..44: note = Description: mAlb298-35
  source 1..44: mol_type = other RNA

SEQ ID NO: 4308 - RNA, 44 nt, synthetic construct; identical to SEQ ID NO: 4272
  misc_feature 1..44: note = Category: Chemically modified MG29-1 sgRNA
  misc_feature 1..44: note = Description: mAlb298-36
  source 1..44: mol_type = other RNA

SEQ ID NO: 4309 - RNA, 46 nt, synthetic construct; identical to SEQ ID NO: 4299
  misc_feature 1..46: note = Category: Chemically modified MG29-1 sgRNA
  misc_feature 1..46: note = Description: mAlb298-37
  source 1..46: mol_type = other RNA

SEQ ID NO: 4310 - RNA, 46 nt, synthetic construct; identical to SEQ ID NO: 4299
  misc_feature 1..46: note = Category: Chemically modified MG29-1 sgRNA
  misc_feature 1..46: note = Description: mAlb298-38
  source 1..46: mol_type = other RNA

SEQ ID NO: 4311 - RNA, 46 nt, synthetic construct; identical to SEQ ID NO: 4299
  misc_feature 1..46: note = Category: Chemically modified MG29-1 sgRNA
  misc_feature 1..46: note = Description: mAlb298-39
  source 1..46: mol_type = other RNA

SEQ ID NO: 4312 - RNA, 46 nt, synthetic construct; identical to SEQ ID NO: 4299
  misc_feature 1..46: note = Category: Chemically modified MG29-1 sgRNA
  misc_feature 1..46: note = Description: mAlb298-40
  source 1..46: mol_type = other RNA

SEQ ID NO: 4313 - DNA, 46 bp, synthetic construct
  misc_feature 19..24: note = DNA
  misc_feature 1..18: note = RNA
  misc_feature 25..46: note = RNA
  source 1..46: mol_type = other DNA
  modified_base 1: mod_base = cm
  modified_base 2: mod_base = um
  modified_base 3: mod_base = um
  modified_base 10: mod_base = um
  modified_base 11: mod_base = cm
  modified_base 12: mod_base = um
  modified_base 13: mod_base = OTHER; note = 2'-O-methyladenosine
  misc_feature 25..45: note = 2'-fluoroadenosine, 2'-fluorocytosin, 2'-fluoroguanosine, 2'-fluorouridine
  modified_base 46: mod_base = OTHER; note = 2'-O-methyladenosine
  modified_base 1..2: mod_base = OTHER; note = Phosphorothioate linkage
  modified_base 2..3: mod_base = OTHER; note = Phosphorothioate linkage
  modified_base 3..4: mod_base = OTHER; note = Phosphorothioate linkage
  modified_base 4..5: mod_base = OTHER; note = Phosphorothioate linkage
  modified_base 15..16: mod_base = OTHER; note = Phosphorothioate linkage
  modified_base 16..17: mod_base = OTHER; note = Phosphorothioate linkage
  modified_base 17..18: mod_base = OTHER; note = Phosphorothioate linkage
  modified_base 18..19: mod_base = OTHER; note = Phosphorothioate linkage
  modified_base 41..42: mod_base = OTHER; note = Phosphorothioate linkage
  modified_base 42..43: mod_base = OTHER; note = Phosphorothioate linkage
  modified_base 44..45: mod_base = OTHER; note = Phosphorothioate linkage
  modified_base 45..46: mod_base = OTHER; note = Phosphorothioate linkage
cttttaatttctactgttgtagatctgtaacgatcgggaactggca

SEQ ID NO: 4314 - RNA, 46 nt, synthetic construct; identical to SEQ ID NO: 4299
  misc_feature 1..46: note = Category: Chemically modified MG29-1 sgRNA
  misc_feature 1..46: note = Description: mAlb298-42
  source 1..46: mol_type = other RNA

SEQ ID NO: 4315 - RNA, 46 nt, synthetic construct; identical to SEQ ID NO: 4299
  misc_feature 1..46: note = Category: Chemically modified MG29-1 sgRNA
  misc_feature 1..46: note = Description: mAlb298-43
  source 1..46: mol_type = other RNA

SEQ ID NO: 4316 - DNA, 22 bp, synthetic construct
  misc_feature 1..22: note = Category: MG29-1 TRAC Guides
  misc_feature 1..22: note = Description: MG29-1 Guide 1 Target Sequence
  source 1..22: mol_type = other DNA
accgattttgattctcaaacaa

SEQ ID NO: 4317 - DNA, 22 bp, synthetic construct
  misc_feature 1..22: note = Category: MG29-1 TRAC Guides
  misc_feature 1..22: note = Description: MG29-1 Guide 2 Target Sequence
  source 1..22: mol_type = other DNA
tgattctcaaacaaatgtgtca

SEQ ID NO: 4318 - DNA, 22 bp, synthetic construct
  misc_feature 1..22: note = Category: MG29-1 TRAC Guides
  misc_feature 1..22: note = Description: MG29-1 Guide 3 Target Sequence
  source 1..22: mol_type = other DNA
gattctcaaacaaatgtgtcac

SEQ ID NO: 4319 - DNA, 22 bp, synthetic construct
  misc_feature 1..22: note = Category: MG29-1 TRAC Guides
  misc_feature 1..22: note = Description: MG29-1 Guide 4 Target Sequence
  source 1..22: mol_type = other DNA
attctcaaacaaatgtgtcaca

SEQ ID NO: 4320 - DNA, 22 bp, synthetic construct
  misc_feature 1..22: note = Category: MG29-1 TRAC Guides
  misc_feature 1..22: note = Description: MG29-1 Guide 5 Target Sequence
  source 1..22: mol_type = other DNA
tcaaacaaatgtgtcacaaagt

SEQ ID NO: 4321 - DNA, 22 bp, synthetic construct
  misc_feature 1..22: note = Category: MG29-1 TRAC Guides
  misc_feature 1..22: note = Description: MG29-1 Guide 6 Target Sequence
  source 1..22: mol_type = other DNA
tgatgtgtatatcacagacaaa

SEQ ID NO: 4322 - DNA, 22 bp, synthetic construct
  misc_feature 1..22: note = Category: MG29-1 TRAC Guides
  misc_feature 1..22: note = Description: MG29-1 Guide 7 Target Sequence
  source 1..22: mol_type = other DNA
aagagcaacagtgctgtggcct

SEQ ID NO: 4323 - DNA, 22 bp, synthetic construct
  misc_feature 1..22: note = Category: MG29-1 TRAC Guides
  misc_feature 1..22: note = Description: MG29-1 Guide 8 Target Sequence
  source 1..22: mol_type = other DNA
gcatgtgcaaacgccttcaaca

SEQ ID NO: 4324 - DNA, 22 bp, synthetic construct
  misc_feature 1..22: note = Category: MG29-1 TRAC Guides
  misc_feature 1..22: note = Description: MG29-1 Guide 9 Target Sequence
  source 1..22: mol_type = other DNA
catgtgcaaacgccttcaacaa

SEQ ID NO: 4325 - DNA, 22 bp, synthetic construct
  misc_feature 1..22: note = Category: MG29-1 TRAC Guides
  misc_feature 1..22: note = Description: MG29-1 Guide 10 Target Sequence
  source 1..22: mol_type = other DNA
aacaacagcattattccagaag

SEQ ID NO: 4326 - DNA, 22 bp, synthetic construct
  misc_feature 1..22: note = Category: MG29-1 TRAC Guides
  misc_feature 1..22: note = Description: MG29-1 Guide 11 Target Sequence
  source 1..22: mol_type = other DNA
ttccagaagacaccttcttccc

SEQ ID NO: 4327 - DNA, 22 bp, synthetic construct
  misc_feature 1..22: note = Category: MG29-1 TRAC Guides
  misc_feature 1..22: note = Description: MG29-1 Guide 12 Target Sequence
  source 1..22: mol_type = other DNA
cagaagacaccttcttccccag

SEQ ID NO: 4328 - DNA, 22 bp, synthetic construct
  misc_feature 1..22: note = Category: MG29-1 TRAC Guides
  misc_feature 1..22: note = Description: MG29-1 Guide 13 Target Sequence
  source 1..22: mol_type = other DNA
tggaataatgctgttgttgaag

SEQ ID NO: 4329 - DNA, 22 bp, synthetic construct
  misc_feature 1..22: note = Category: MG29-1 TRAC Guides
  misc_feature 1..22: note = Description: MG29-1 Guide 14 Target Sequence
  source 1..22: mol_type = other DNA
ttgaaggcgtttgcacatgcaa

SEQ ID NO: 4330 - DNA, 22 bp, synthetic construct
  misc_feature 1..22: note = Category: MG29-1 TRAC Guides
  misc_feature 1..22: note = Description: MG29-1 Guide 15 Target Sequence
  source 1..22: mol_type = other DNA
aaggcgtttgcacatgcaaagt

SEQ ID NO: 4331 - DNA, 22 bp, synthetic construct
  misc_feature 1..22: note = Category: MG29-1 TRAC Guides
  misc_feature 1..22: note = Description: MG29-1 Guide 16 Target Sequence
  source 1..22: mol_type = other DNA
gcacatgcaaagtcagatttgt

SEQ ID NO: 4332 - DNA, 22 bp, synthetic construct
  misc_feature 1..22: note = Category: MG29-1 TRAC Guides
  misc_feature 1..22: note = Description: MG29-1 Guide 17 Target Sequence
  source 1..22: mol_type = other DNA
cacatgcaaagtcagatttgtt

SEQ ID NO: 4333 - DNA, 22 bp, synthetic construct
  misc_feature 1..22: note = Category: MG29-1 TRAC Guides
  misc_feature 1..22: note = Description: MG29-1 Guide 18 Target Sequence
  source 1..22: mol_type = other DNA
gttgctccaggccacagcactg

SEQ ID NO: 4334 - DNA, 22 bp, synthetic construct
  misc_feature 1..22: note = Category: MG29-1 TRAC Guides
  misc_feature 1..22: note = Description: MG29-1 Guide 19 Target Sequence
  source 1..22: mol_type = other DNA
ttgctccaggccacagcactgt

SEQ ID NO: 4335 - DNA, 22 bp, synthetic construct
  misc_feature 1..22: note = Category: MG29-1 TRAC Guides
  misc_feature 1..22: note = Description: MG29-1 Guide 20 Target Sequence
  source 1..22: mol_type = other DNA
ctccaggccacagcactgttgc

SEQ ID NO: 4336 - DNA, 22 bp, synthetic construct
  misc_feature 1..22: note = Category: MG29-1 TRAC Guides
  misc_feature 1..22: note = Description: MG29-1 Guide 21 Target Sequence
  source 1..22: mol_type = other DNA
ctcttgaagtccatagacctca

SEQ ID NO: 4337 - DNA, 22 bp, synthetic construct
  misc_feature 1..22: note = Category: MG29-1 TRAC Guides
  misc_feature 1..22: note = Description: MG29-1 Guide 22 Target Sequence
  source 1..22: mol_type = other DNA
aagtccatagacctcatgtcta

SEQ ID NO: 4338 - DNA, 22 bp, synthetic construct
  misc_feature 1..22: note = Category: MG29-1 TRAC Guides
  misc_feature 1..22: note = Description: MG29-1 Guide 23 Target Sequence
  source 1..22: mol_type = other DNA
tgtctgtgatatacacatcaga

SEQ ID NO: 4339 - DNA, 22 bp, synthetic construct
  misc_feature 1..22: note = Category: MG29-1 TRAC Guides
  misc_feature 1..22: note = Description: MG29-1 Guide 24 Target Sequence
  source 1..22: mol_type = other DNA
gtctgtgatatacacatcagaa

SEQ ID NO: 4340 - DNA, 22 bp, synthetic construct
  misc_feature 1..22: note = Category: MG29-1 TRAC Guides
  misc_feature 1..22: note = Description: MG29-1 Guide 25 Target Sequence
  source 1..22: mol_type = other DNA
tctgtgatatacacatcagaat

SEQ ID NO: 4341 - DNA, 22 bp, synthetic construct
  misc_feature 1..22: note = Category: MG29-1 TRAC Guides
  misc_feature 1..22: note = Description: MG29-1 Guide 26 Target Sequence
  source 1..22: mol_type = other DNA
ctttgtgacacatttgtttgag

SEQ ID NO: 4342 - DNA, 22 bp, synthetic construct
  misc_feature 1..22: note = Category: MG29-1 TRAC Guides
  misc_feature 1..22: note = Description: MG29-1 Guide 27 Target Sequence
  source 1..22: mol_type = other DNA
gtgacacatttgtttgagaatc

SEQ ID NO: 4343 - DNA, 22 bp, synthetic construct
  misc_feature 1..22: note = Category: MG29-1 TRAC Guides
  misc_feature 1..22: note = Description: MG29-1 Guide 28 Target Sequence
  source 1..22: mol_type = other DNA
tgacacatttgtttgagaatca

SEQ ID NO: 4344 - DNA, 22 bp, synthetic construct
  misc_feature 1..22: note = Category: MG29-1 TRAC Guides
  misc_feature 1..22: note = Description: MG29-1 Guide 29 Target Sequence
  source 1..22: mol_type = other DNA
gtttgagaatcaaaatcggtga

SEQ ID NO: 4345 - DNA, 22 bp, synthetic construct
  misc_feature 1..22: note = Category: MG29-1 TRAC Guides
  misc_feature 1..22: note = Description: MG29-1 Guide 30 Target Sequence
  source 1..22: mol_type = other DNA
tttgagaatcaaaatcggtgaa

SEQ ID NO: 4346 - DNA, 22 bp, synthetic construct
  misc_feature 1..22: note = Category: MG29-1 TRAC Guides
  misc_feature 1..22: note = Description: MG29-1 Guide 31 Target Sequence
  source 1..22: mol_type = other DNA
gagaatcaaaatcggtgaatag

SEQ ID NO: 4347 - DNA, 22 bp, synthetic construct
  misc_feature 1..22: note = Category: MG29-1 TRAC Guides
  misc_feature 1..22: note = Description: MG29-1 Guide 32 Target Sequence
  source 1..22: mol_type = other DNA
agaatcaaaatcggtgaatagg

SEQ ID NO: 4348 - DNA, 22 bp, synthetic construct
  misc_feature 1..22: note = Category: MG29-1 TRAC Guides
  misc_feature 1..22: note = Description: MG29-1 Guide 33 Target Sequence
  source 1..22: mol_type = other DNA
tcactggatttagagtctctca

SEQ ID NO: 4349 - DNA, 22 bp, synthetic construct
  misc_feature 1..22: note = Category: MG29-1 TRAC Guides
  misc_feature 1..22: note = Description: MG29-1 Guide 34 Target Sequence
  source 1..22: mol_type = other DNA
agagtctctcagctggtacacg

SEQ ID NO: 4350 - DNA, 22 bp, synthetic construct
  misc_feature 1..22: note = Category: MG29-1 TRAC Guides
  misc_feature 1..22: note = Description: MG29-1 Guide 35 Target Sequence
  source 1..22: mol_type = other DNA
gagtctctcagctggtacacgg

SEQ ID NO: 4351 - DNA, 22 bp, synthetic construct
  misc_feature 1..22: note = Category: MG29-1 TRAC Guides
  misc_feature 1..22: note = Description: MG29-1 Guide 36 Target Sequence
  source 1..22: mol_type = other DNA
ctgtgatgtcaagctggtcgag

SEQ ID NO: 4352 - DNA, 22 bp, synthetic construct
  misc_feature 1..22: note = Category: MG29-1 TRAC Guides
  misc_feature 1..22: note = Description: MG29-1 Guide 37 Target Sequence
  source 1..22: mol_type = other DNA
caaagcttttctcgaccagctt

SEQ ID NO: 4353 - DNA, 22 bp, synthetic construct
  misc_feature 1..22: note = Category: MG29-1 TRAC Guides
  misc_feature 1..22: note = Description: MG29-1 Guide 38 Target Sequence
  source 1..22: mol_type = other DNA
aaagcttttctcgaccagcttg

SEQ ID NO: 4354 - DNA, 22 bp, synthetic construct
  misc_feature 1..22: note = Category: MG29-1 TRAC Guides
  misc_feature 1..22: note = Description: MG29-1 Guide 39 Target Sequence
  source 1..22: mol_type = other DNA
tctcgaccagcttgacatcaca

SEQ ID NO: 4355 - DNA, 22 bp, synthetic construct
  misc_feature 1..22: note = Category: MG29-1 TRAC Guides
  misc_feature 1..22: note = Description: MG29-1 Guide 40 Target Sequence
  source 1..22: mol_type = other DNA
ctcgaccagcttgacatcacag

SEQ ID NO: 4356 - DNA, 22 bp, synthetic construct
  misc_feature 1..22: note = Category: MG29-1 TRAC Guides
  misc_feature 1..22: note = Description: MG29-1 Guide 41 Target Sequence
  source 1..22: mol_type = other DNA
tcgaccagcttgacatcacagg

SEQ ID NO: 4357 - DNA, 22 bp, synthetic construct
  misc_feature 1..22: note = Category: MG29-1 TRAC Guides
  misc_feature 1..22: note = Description: MG29-1 Guide 42 Target Sequence
  source 1..22: mol_type = other DNA
caaaacctgtcagtgattgggt

SEQ ID NO: 4358 - DNA, 22 bp, synthetic construct
  misc_feature 1..22: note = Category: MG29-1 TRAC Guides
  misc_feature 1..22: note = Description: MG29-1 Guide 43 Target Sequence
  source 1..22: mol_type = other DNA
aaaacctgtcagtgattgggtt

SEQ ID NO: 4359 - DNA, 22 bp, synthetic construct
  misc_feature 1..22: note = Category: MG29-1 TRAC Guides
  misc_feature 1..22: note = Description: MG29-1 Guide 44 Target Sequence
  source 1..22: mol_type = other DNA
ggttccgaatcctcctcctgaa

SEQ ID NO: 4360 - DNA, 22 bp, synthetic construct
  misc_feature 1..22: note = Category: MG29-1 TRAC Guides
  misc_feature 1..22: note = Description: MG29-1 Guide 45 Target Sequence
  source 1..22: mol_type = other DNA
cgaatcctcctcctgaaagtgg

SEQ ID NO: 4361 - DNA, 22 bp, synthetic construct
  misc_feature 1..22: note = Category: MG29-1 TRAC Guides
  misc_feature 1..22: note = Description: MG29-1 Guide 46 Target Sequence
  source 1..22: mol_type = other DNA
aatctgctcatgacgctgcggc

SEQ ID NO: 4362 - DNA, 22 bp, synthetic construct
  misc_feature 1..22: note = Category: MG29-1 TRAC Guides
  misc_feature 1..22: note = Description: MG29-1 Guide 47 Target Sequence
  source 1..22: mol_type = other DNA
atctgctcatgacgctgcggct

SEQ ID NO: 4363 - DNA, 22 bp, synthetic construct
  misc_feature 1..22: note = Category: MG29-1 TRAC Guides
  misc_feature 1..22: note = Description: MG29-1 Guide 48 Target Sequence
  source 1..22: mol_type = other DNA
aacccggccactttcaggagga

SEQ ID NO: 4364 - DNA, 22 bp, synthetic construct
  misc_feature 1..22: note = Category: MG29-1 TRAC Guides
  misc_feature 1..22: note = Description: MG29-1 Guide 49 Target Sequence
  source 1..22: mol_type = other DNA
caggaggaggattcggaaccca

SEQ ID NO: 4365 - DNA, 22 bp, synthetic construct
  misc_feature 1..22: note = Category: MG29-1 TRAC Guides
  misc_feature 1..22: note = Description: MG29-1 Guide 50 Target Sequence
  source 1..22: mol_type = other DNA
aggaggaggattcggaacccaa

SEQ ID NO: 4366 - DNA, 22 bp, synthetic construct
  misc_feature 1..22: note = Category: MG29-1 TRAC Guides
  misc_feature 1..22: note = Description: MG29-1 Guide 51 Target Sequence
  source 1..22: mol_type = other DNA
ggaacccaatcactgacaggtt

SEQ ID NO: 4367 - DNA, 22 bp, synthetic construct
  misc_feature 1..22: note = Category: MG29-1 TRAC Guides
  misc_feature 1..22: note = Description: MG29-1 Guide 52 Target Sequence
  source 1..22: mol_type = other DNA
tgaaagtttaggttcgtatctg

SEQ ID NO: 4368 - DNA, 22 bp, synthetic construct
  misc_feature 1..22: note = Category: MG29-1 TRAC Guides
  misc_feature 1..22: note = Description: MG29-1 Guide 53 Target Sequence
  source 1..22: mol_type = other DNA
gaaagtttaggttcgtatctgt

SEQ ID NO: 4369 - DNA, 22 bp, synthetic construct
  misc_feature 1..22: note = Category: MG29-1 TRAC Guides
  misc_feature 1..22: note = Description: MG29-1 Guide 54 Target Sequence
  source 1..22: mol_type = other DNA
aaagtttaggttcgtatctgta

SEQ ID NO: 4370 - RNA, 42 nt, synthetic construct
  misc_feature 1..42: note = Category: MG29-1 TRAC Guides
  misc_feature 1..42: note = Description: MG29-1 Guide 1 sgRNA synthesized
  source 1..42: mol_type = other RNA
taatttctactgttgtagataccgattttgattctcaaacaa

SEQ ID NO: 4371 - RNA, 42 nt, synthetic construct
  misc_feature 1..42: note = Category: MG29-1 TRAC Guides
  misc_feature 1..42: note = Description: MG29-1 Guide 2 sgRNA synthesized
  source 1..42: mol_type = other RNA
taatttctactgttgtagattgattctcaaacaaatgtgtca

SEQ ID NO: 4372 - RNA, 42 nt, synthetic construct
  misc_feature 1..42: note = Category: MG29-1 TRAC Guides
  misc_feature 1..42: note = Description: MG29-1 Guide 3 sgRNA synthesized
  source 1..42: mol_type = other RNA
taatttctactgttgtagatgattctcaaacaaatgtgtcac

SEQ ID NO: 4373 - RNA, 42 nt, synthetic construct
  misc_feature 1..42: note = Category: MG29-1 TRAC Guides
  misc_feature 1..42: note = Description: MG29-1 Guide 4 sgRNA synthesized
  source 1..42: mol_type = other RNA
taatttctactgttgtagatattctcaaacaaatgtgtcaca

SEQ ID NO: 4374 - RNA, 42 nt, synthetic construct
  misc_feature 1..42: note = Category: MG29-1 TRAC Guides
  misc_feature 1..42: note = Description: MG29-1 Guide 5 sgRNA synthesized
  source 1..42: mol_type = other RNA
taatttctactgttgtagattcaaacaaatgtgtcacaaagt

SEQ ID NO: 4375 - RNA, 42 nt, synthetic construct
  misc_feature 1..42: note = Category: MG29-1 TRAC Guides
  misc_feature 1..42: note = Description: MG29-1 Guide 6 sgRNA synthesized
  source 1..42: mol_type = other RNA
taatttctactgttgtagattgatgtgtatatcacagacaaa

SEQ ID NO: 4376 - RNA, 42 nt, synthetic construct
  misc_feature 1..42: note = Category: MG29-1 TRAC Guides
  misc_feature 1..42: note = Description: MG29-1 Guide 7 sgRNA synthesized
  source 1..42: mol_type = other RNA
taatttctactgttgtagataagagcaacagtgctgtggcct

SEQ ID NO: 4377 - RNA, 42 nt, synthetic construct
  misc_feature 1..42: note = Category: MG29-1 TRAC Guides
  misc_feature 1..42: note = Description: MG29-1 Guide 8 sgRNA synthesized
  source 1..42: mol_type = other RNA
taatttctactgttgtagatgcatgtgcaaacgccttcaaca

SEQ ID NO: 4378 - RNA, 42 nt, synthetic construct
  misc_feature 1..42: note = Category: MG29-1 TRAC Guides
  misc_feature 1..42: note = Description: MG29-1 Guide 9 sgRNA synthesized
  source 1..42: mol_type = other RNA
taatttctactgttgtagatcatgtgcaaacgccttcaacaa

SEQ ID NO: 4379 - RNA, 42 nt, synthetic construct
  misc_feature 1..42: note = Category: MG29-1 TRAC Guides
  misc_feature 1..42: note = Description: MG29-1 Guide 10 sgRNA synthesized
  source 1..42: mol_type = other RNA
taatttctactgttgtagataacaacagcattattccagaag

SEQ ID NO: 4380 - RNA, 42 nt, synthetic construct
  misc_feature 1..42: note = Category: MG29-1 TRAC Guides
  misc_feature 1..42: note = Description: MG29-1 Guide 11 sgRNA synthesized
  source 1..42: mol_type = other RNA
taatttctactgttgtagatttccagaagacaccttcttccc

SEQ ID NO: 4381 - RNA, 42 nt, synthetic construct
  misc_feature 1..42: note = Category: MG29-1 TRAC Guides
  misc_feature 1..42: note = Description: MG29-1 Guide 12 sgRNA synthesized
  source 1..42: mol_type = other RNA
taatttctactgttgtagatcagaagacaccttcttccccag

SEQ ID NO: 4382 - RNA, 42 nt, synthetic construct
  misc_feature 1..42: note = Category: MG29-1 TRAC Guides
  misc_feature 1..42: note = Description: MG29-1 Guide 13 sgRNA synthesized
  source 1..42: mol_type = other RNA
taatttctactgttgtagattggaataatgctgttgttgaag

SEQ ID NO: 4383 - RNA, 42 nt, synthetic construct
  misc_feature 1..42: note = Category: MG29-1 TRAC Guides
  misc_feature 1..42: note = Description: MG29-1 Guide 14 sgRNA synthesized
  source 1..42: mol_type = other RNA
taatttctactgttgtagatttgaaggcgtttgcacatgcaa

SEQ ID NO: 4384 - RNA, 42 nt, synthetic construct
  misc_feature 1..42: note = Category: MG29-1 TRAC Guides
  misc_feature 1..42: note = Description: MG29-1 Guide 15 sgRNA synthesized
  source 1..42: mol_type = other RNA
taatttctactgttgtagataaggcgtttgcacatgcaaagt

SEQ ID NO: 4385 - RNA, 42 nt, synthetic construct
  misc_feature 1..42: note = Category: MG29-1 TRAC Guides
  misc_feature 1..42: note = Description: MG29-1 Guide 16 sgRNA synthesized
  source 1..42: mol_type = other RNA
taatttctactgttgtagatgcacatgcaaagtcagatttgt

SEQ ID NO: 4386 - RNA, 42 nt, synthetic construct
  misc_feature 1..42: note = Category: MG29-1 TRAC Guides
  misc_feature 1..42: note = Description: MG29-1 Guide 17 sgRNA synthesized
  source 1..42: mol_type = other RNA
taatttctactgttgtagatcacatgcaaagtcagatttgtt

SEQ ID NO: 4387 - RNA, 42 nt, synthetic construct
  misc_feature 1..42: note = Category: MG29-1 TRAC Guides
  misc_feature 1..42: note = Description: MG29-1 Guide 18 sgRNA synthesized
  source 1..42: mol_type = other RNA
taatttctactgttgtagatgttgctccaggccacagcactg

SEQ ID NO: 4388 - RNA, 42 nt, synthetic construct
  misc_feature 1..42: note = Category: MG29-1 TRAC Guides
  misc_feature 1..42: note = Description: MG29-1 Guide 19 sgRNA synthesized
  source 1..42: mol_type = other RNA
taatttctactgttgtagatttgctccaggccacagcactgt

SEQ ID NO: 4389 - RNA, 42 nt, synthetic construct
  misc_feature 1..42: note = Category: MG29-1 TRAC Guides
  misc_feature 1..42: note = Description: MG29-1 Guide 20 sgRNA synthesized
  source 1..42: mol_type = other RNA
taatttctactgttgtagatctccaggccacagcactgttgc

SEQ ID NO: 4390 - RNA, 42 nt, synthetic construct
  misc_feature 1..42: note = Category: MG29-1 TRAC Guides
  misc_feature 1..42: note = Description: MG29-1 Guide 21 sgRNA synthesized
  source 1..42: mol_type = other RNA
taatttctactgttgtagatctcttgaagtccatagacctca

SEQ ID NO: 4391 - RNA, 42 nt, synthetic construct
  misc_feature 1..42: note = Category: MG29-1 TRAC Guides
  misc_feature 1..42: note = Description: MG29-1 Guide 22 sgRNA synthesized
  source 1..42: mol_type = other RNA
taatttctactgttgtagataagtccatagacctcatgtcta

SEQ ID NO: 4392 - RNA, 42 nt, synthetic construct
  misc_feature 1..42: note = Category: MG29-1 TRAC Guides
  misc_feature 1..42: note = Description: MG29-1 Guide 23 sgRNA synthesized
  source 1..42: mol_type = other RNA
taatttctactgttgtagattgtctgtgatatacacatcaga

SEQ ID NO: 4393 - RNA, 42 nt, synthetic construct
  misc_feature 1..42: note = Category: MG29-1 TRAC Guides
  misc_feature 1..42: note = Description: MG29-1 Guide 24 sgRNA synthesized
  source 1..42: mol_type = other RNA
taatttctactgttgtagatgtctgtgatatacacatcagaa

SEQ ID NO: 4394 - RNA, 42 nt, synthetic construct
  misc_feature 1..42: note = Category: MG29-1 TRAC Guides
  misc_feature 1..42: note = Description: MG29-1 Guide 25 sgRNA synthesized
  source 1..42: mol_type = other RNA
taatttctactgttgtagattctgtgatatacacatcagaat

SEQ ID NO: 4395 - RNA, 42 nt, synthetic construct
  misc_feature 1..42: note = Category: MG29-1 TRAC Guides
  misc_feature 1..42: note = Description: MG29-1 Guide 26 sgRNA synthesized
  source 1..42: mol_type = other RNA
taatttctactgttgtagatctttgtgacacatttgtttgag

SEQ ID NO: 4396 - RNA, 42 nt, synthetic construct
  misc_feature 1..42: note = Category: MG29-1 TRAC Guides
  misc_feature 1..42: note = Description: MG29-1 Guide 27 sgRNA synthesized
  source 1..42: mol_type = other RNA
taatttctactgttgtagatgtgacacatttgtttgagaatc

SEQ ID NO: 4397 - RNA, 42 nt, synthetic construct
  misc_feature 1..42: note = Category: MG29-1 TRAC Guides
  misc_feature 1..42: note = Description: MG29-1 Guide 28 sgRNA synthesized
  source 1..42: mol_type = other RNA
taatttctactgttgtagattgacacatttgtttgagaatca

SEQ ID NO: 4398 - RNA, 42 nt, synthetic construct
  misc_feature 1..42: note = Category: MG29-1 TRAC Guides
  misc_feature 1..42: note = Description: MG29-1 Guide 29 sgRNA synthesized
  source 1..42: mol_type = other RNA
taatttctactgttgtagatgtttgagaatcaaaatcggtga

SEQ ID NO: 4399 - RNA, 42 nt, synthetic construct
  misc_feature 1..42: note = Category: MG29-1 TRAC Guides
  misc_feature 1..42: note = Description: MG29-1 Guide 30 sgRNA synthesized
  source 1..42: mol_type = other RNA
taatttctactgttgtagattttgagaatcaaaatcggtgaa

SEQ ID NO: 4400 - RNA, 42 nt, synthetic construct
  misc_feature 1..42: note = Category: MG29-1 TRAC Guides
  misc_feature 1..42: note = Description: MG29-1 Guide 31 sgRNA synthesized
  source 1..42: mol_type = other RNA
taatttctactgttgtagatgagaatcaaaatcggtgaatag

SEQ ID NO: 4401 - RNA, 42 nt, synthetic construct
  misc_feature 1..42: note = Category: MG29-1 TRAC Guides
  misc_feature 1..42: note = Description: MG29-1 Guide 32 sgRNA synthesized
  source 1..42: mol_type = other RNA
taatttctactgttgtagatagaatcaaaatcggtgaatagg

SEQ ID NO: 4402 - RNA, 42 nt, synthetic construct
  misc_feature 1..42: note = Category: MG29-1 TRAC Guides
  misc_feature 1..42: note = Description: MG29-1 Guide 33 sgRNA synthesized
  source 1..42: mol_type = other RNA
taatttctactgttgtagattcactggatttagagtctctca

SEQ ID NO: 4403 - RNA, 42 nt, synthetic construct
  misc_feature 1..42: note = Category: MG29-1 TRAC Guides
  misc_feature 1..42: note = Description: MG29-1 Guide 34 sgRNA synthesized
  source 1..42: mol_type = other RNA
taatttctactgttgtagatagagtctctcagctggtacacg

SEQ ID NO: 4404 - RNA, 42 nt, synthetic construct
  misc_feature 1..42: note = Category: MG29-1 TRAC Guides
  misc_feature 1..42: note = Description: MG29-1 Guide 35 sgRNA synthesized
  source 1..42: mol_type = other RNA
taatttctactgttgtagatgagtctctcagctggtacacgg

SEQ ID NO: 4405 - RNA, 42 nt, synthetic construct
  misc_feature 1..42: note = Category: MG29-1 TRAC Guides
  misc_feature 1..42: note = Description: MG29-1 Guide 36 sgRNA synthesized
  source 1..42: mol_type = other RNA
taatttctactgttgtagatctgtgatgtcaagctggtcgag

SEQ ID NO: 4406 - RNA, 42 nt, synthetic construct
  misc_feature 1..42: note = Category: MG29-1 TRAC Guides
  misc_feature 1..42: note = Description: MG29-1 Guide 37 sgRNA synthesized
  source 1..42: mol_type = other RNA
taatttctactgttgtagatcaaagcttttctcgaccagctt

SEQ ID NO: 4407 - RNA, 42 nt, synthetic construct
  misc_feature 1..42: note = Category: MG29-1 TRAC Guides
  misc_feature 1..42: note = Description: MG29-1 Guide 38 sgRNA synthesized
  source 1..42: mol_type = other RNA
taatttctactgttgtagataaagcttttctcgaccagcttg

SEQ ID NO: 4408 - RNA, 42 nt, synthetic construct
  misc_feature 1..42: note = Category: MG29-1 TRAC Guides
  misc_feature 1..42: note = Description: MG29-1 Guide 39 sgRNA synthesized
  source 1..42: mol_type = other RNA
taatttctactgttgtagattctcgaccagcttgacatcaca

SEQ ID NO: 4409 - RNA, 42 nt, synthetic construct
  misc_feature 1..42: note = Category: MG29-1 TRAC Guides
  misc_feature 1..42: note = Description: MG29-1 Guide 40 sgRNA synthesized
  source 1..42: mol_type = other RNA
taatttctactgttgtagatctcgaccagcttgacatcacag

SEQ ID NO: 4410 - RNA, 42 nt, synthetic construct
  misc_feature 1..42: note = Category: MG29-1 TRAC Guides
  misc_feature 1..42: note = Description: MG29-1 Guide 41 sgRNA synthesized
  source 1..42: mol_type = other RNA
taatttctactgttgtagattcgaccagcttgacatcacagg

SEQ ID NO: 4411 - RNA, 42 nt, synthetic construct
  misc_feature 1..42: note = Category: MG29-1 TRAC Guides
  misc_feature 1..42: note = Description: MG29-1 Guide 42 sgRNA synthesized
  source 1..42: mol_type = other RNA
taatttctactgttgtagatcaaaacctgtcagtgattgggt

SEQ ID NO: 4412 - RNA, 42 nt, synthetic construct
  misc_feature 1..42: note = Category: MG29-1 TRAC Guides
  misc_feature 1..42: note = Description: MG29-1 Guide 43 sgRNA synthesized
  source 1..42: mol_type = other RNA
taatttctactgttgtagataaaacctgtcagtgattgggtt

SEQ ID NO: 4413 - RNA, 42 nt, synthetic construct
  misc_feature 1..42: note = Category: MG29-1 TRAC Guides
  misc_feature 1..42: note = Description: MG29-1 Guide 44 sgRNA synthesized
  source 1..42: mol_type = other RNA
taatttctactgttgtagatggttccgaatcctcctcctgaa

SEQ ID NO: 4414 - RNA, 42 nt, synthetic construct
  misc_feature 1..42: note = Category: MG29-1 TRAC Guides
  misc_feature 1..42: note = Description: MG29-1 Guide 45 sgRNA synthesized
  source 1..42: mol_type = other RNA
taatttctactgttgtagatcgaatcctcctcctgaaagtgg

SEQ ID NO: 4415 - RNA, 42 nt, synthetic construct
  misc_feature 1..42: note = Category: MG29-1 TRAC Guides
  misc_feature 1..42: note = Description: MG29-1 Guide 46 sgRNA synthesized
  source 1..42: mol_type = other RNA
taatttctactgttgtagataatctgctcatgacgctgcggc

SEQ ID NO: 4416 - RNA, 42 nt, synthetic construct
  misc_feature 1..42: note = Category: MG29-1 TRAC Guides
  misc_feature 1..42: note = Description: MG29-1 Guide 47 sgRNA synthesized
  source 1..42: mol_type = other RNA
taatttctactgttgtagatatctgctcatgacgctgcggct

SEQ ID NO: 4417 - RNA, 42 nt, synthetic construct
  misc_feature 1..42: note = Category: MG29-1 TRAC Guides
  misc_feature 1..42: note = Description: MG29-1 Guide 48 sgRNA synthesized
  source 1..42: mol_type = other RNA
taatttctactgttgtagataacccggccactttcaggagga

SEQ ID NO: 4418 - RNA, 42 nt, synthetic construct
  misc_feature 1..42: note = Category: MG29-1 TRAC Guides
  misc_feature 1..42: note = Description: MG29-1 Guide 49 sgRNA synthesized
  source 1..42: mol_type = other RNA
taatttctactgttgtagatcaggaggaggattcggaaccca

SEQ ID NO: 4419 - RNA, 42 nt, synthetic construct
  misc_feature 1..42: note = Category: MG29-1 TRAC Guides
  misc_feature 1..42: note = Description: MG29-1 Guide 50 sgRNA synthesized
  source 1..42: mol_type = other RNA
taatttctactgttgtagataggaggaggattcggaacccaa

SEQ ID NO: 4420 - RNA, 42 nt, synthetic construct
  misc_feature 1..42: note = Category: MG29-1 TRAC Guides
  misc_feature 1..42: note = Description: MG29-1 Guide 51 sgRNA synthesized
  source 1..42: mol_type = other RNA
taatttctactgttgtagatggaacccaatcactgacaggtt

SEQ ID NO: 4421 - RNA, 42 nt, synthetic construct
  misc_feature 1..42: note = Category: MG29-1 TRAC Guides
  misc_feature 1..42: note = Description: MG29-1 Guide 52 sgRNA synthesized
  source 1..42: mol_type = other RNA
taatttctactgttgtagattgaaagtttaggttcgtatctg

SEQ ID NO: 4422 - RNA, 42 nt, synthetic construct
  misc_feature 1..42: note = Category: MG29-1 TRAC Guides
  misc_feature 1..42: note = Description: MG29-1 Guide 53 sgRNA synthesized
  source 1..42: mol_type = other RNA
taatttctactgttgtagatgaaagtttaggttcgtatctgt

SEQ ID NO: 4423 - RNA, 42 nt, synthetic construct
  misc_feature 1..42: note = Category: MG29-1 TRAC Guides
  misc_feature 1..42: note = Description: MG29-1 Guide 54 sgRNA synthesized
  source 1..42: mol_type = other RNA
taatttctactgttgtagataaagtttaggttcgtatctgta

SEQ ID NO: 4424 - DNA, 504 bp, synthetic construct
  misc_feature 1..504: note = Category: Transgene donor (AAV genome) #3028
  misc_feature 1..504: note = Description: Transgene 5' homology arm
  source 1..504: mol_type = other DNA
ttaattaatgccaacataccataaacctcccattctgctaatgcccagcctaagttggggagaccactccagattccaagatgtacagtttgctttgctgggcctttttcccatgcctgcctttactctgccagagttatattgctggggttttgaagaagatcctattaaataaaagaataagcagtattattaagtagccctgcatttcaggtttccttgagtggcaggccaggcctggccgtgaacgttcactgaaatcatggcctcttggccaagattgatagcttgtgcctgtccctgagtcccagtccatcacgagcagctggtttctaagatgctatttcccgtataaagcatgagaccgtgacttgccagccccacagagccccgcccttgtccatcactggcatctggactccagcctgggttggggcaaagagggaaatgagatcatgtcctaaccctgatcctcttgtcccacagatatccagaaccctgacc

SEQ ID NO: 4425 - DNA, 378 bp, synthetic construct
  misc_feature 1..378: note = Category: Transgene donor (AAV genome) #3028
  misc_feature 1..378: note = Description: Transgene 3' homology arm
  source 1..378: mol_type = other DNA
tgaaagcttgataatcaacctctggattacaaaatttgtgaaagattgactggtattcttaactatgttgctccttttacgctatgtggatacgctgctttaatgcctttgtatcatgctattgcttcccgtatggctttcattttctcctccttgtataaatcctggttagttcttgccacggcggaactcatcgccgcctgccttgcccgctgctggacaggggctcggctgttgggcactgacaattccgtggaacttgtttattgcagcttataatggttacaaataaagcaatagcatcacaaatttcacaaataaagcatttttttcactgcattctagttgtggtttgtccaaactcatcaatgtatctta

SEQ ID NO: 4426 - RNA, 4220 nt, unidentified
  source 1..4220: mol_type = mRNA; note = MG29-1 WT mRNA sequence; note = uncultivated organism sequence
taatacgactcactataaggaaaagccagctccagcaggcgctgctcactcctccccatcctctccctctgtccctctgtccctctgaccctgcactgtcccagcaccatggcccccaagaagaagcggaaagttggcggcggaggcagcttcaacaacttcatcaagaaatacagcctgcagaagaccctgcggttcgaactgaagcccgtgggcgagacagcggactacatcgaagacttcaagagcgaatacctgaaggacacggtgctgaaggacgaacagcgggcaaaagactaccaggagatcaaaacactgatcgacgactaccaccgggagtacatcgaagaatgcctgagggaacccgtggacaaaaagaccggcgagatcctggacttcacacaggacctggaagacgcattcagctactaccagaaactgaaagaaaaccccaccgagaaccgagtggggtgggagaaagagcaggagagcctgagaaagaagctggtgaccagcttcgtggggaacgacggcctgttcaagaaagagttcatcacccgcgacctgcccgaatggctgcagaaaaaggggctgtggggcgaatacaaggacaccgtggagaacttcaaaaaattcaccacctacttcagcggcttccacgagaacaggaagaatatgtacacagccgaagcccagagcacagccatcgccaacaggctgatgaacgacaacctgcccaagttcttcaacaactacctggcataccagaccatcaaggagaaacaccccgacctggtgttccgactggacgacgccctgctgcaggccgccggcgtggagcacctggacgaggcattccagcccagatacttcagcagactgttcgcacagagcggaatcacggccttcaacgagctgatcggaggaaggaccacggaaaacggcgaaaagatccagggcctgaacgagcagatcaacctgtacagacagcagaaccccgagaaggccaagggcttcccaagattcatgcccctgttcaagcaaatcctgagcgacagggagacccacagcttcctgcccgacgcattcgaaaacgacaaagagctgctgcaggccctgagggactacgtggacgccgccaccagcgaagaaggaatgatcagccaactgaacaaggccatgaaccagttcgtgaccgccgacctgaaaagggtgtacatcaaaagcgccgccctgaccagcctgagccaggaactgttccacttcttcggcgtgatcagcgacgccatcgcgtggtacgccgagaagagactgagccccaagaaagcccaggagagcttcctgaaacaggaagtgtacgccatcgaagaactgaaccaggccgtggtgggctacatcgaccagctggaagaccagagcgagctgcagcagctgctggtggacctgccagacccccagaaaccagtgagcagcttcatcctgacccactggcaaaaaagccaggagccgctgcaggccgtgatcgcgaaggtggaacccctgttcgaactggaggagctgagcaaaaacaaacgggccccgaaacacgacaaggaccagggaggggaaggcttccagcaggtggacgcaatcaagaacatgctggacgcattcatggaggtgagccacgccatcaagcccctgtacctggtgaagggccggaaagcaatcgacatgccggacgtggacacaggattctacgccgacttcgcggaggcatacagcgcctacgagcaagtgacggtgagcctgtacaacaagacccgaaaccacctgagcaagaaacccttcagcaaagacaaaatcaaaatcaacttcgacgccccaacactgctgaacggctgggacctgaacaaggaaagcgacaacaaaagcatcatcctgagaaaagacggaaacttctacctggccatcatgcaccccaaacacacaaaggtgttcgactgctacagcgccagcgaggcggccgggaaatgctacgagaaaatgaactacaaactgctgagcggcgccaacaagatgctgcccaaagtgttcttcagcaagaagggaatcgaaaccttcagcccaccccaggaaatcctggacctgtacaagaacaacgaacacaagaagggagccaccttcaagctggagagctgccacaagctgatcgacttcttcaagcggaacatccccaagtacaaggtgcacccaaccgacaacttcggatgggacgtcttcggattccacttcagcccaaccagcagctacggcgacctgagcggcttctaccgagaggtggaagcccaggggtacaaactgtggttcagcgacgtgagcgaggcatacatcaacaagtgcgtggaagagggcaaactgttcctgttccagatctacaacaaggacttcagccccaacagcaccgggaagccaaacctgcacacactgtactggaaaggactgttcgaacccgagaacctgaaggacgtggtgctgaaactgaacggcgaggccgagatcttctacaggaaacacagcatcaagcacgaggacaagacgatccaccgggccaaggacccaatcgccaacaaaaacgcagacaaccccaagaagcagagcgtgttcgactacgacatcatcaaggacaagcgctacacccaggacaaattcttcttccacgtgcccatcagcctgaacttcaagagccagggagtggtgcggttcaacgacaagatcaacggcctgctggccgcacaggacgacgtgcacgtgatcgggatcgaccgaggggaacgccacctgctgtactacaccgtggtgaacggcaagggcgaggtggtggaacagggcagcctgaaccaggtggccacagaccaggggtacgtggtggactaccaacagaaactgcacgccaaagagaaggagagagaccaggccaggaagaactggagcaccatcgaaaacatcaaggagctgaaggccgggtacctgagccaggtggtgcacaaactggcccagctgatcgtgaaacacaacgccatcgtgtgcctggaggacctgaacttcggattcaagaggggacggttcaaagtggagaagcaggtgtaccagaagttcgagaaagccctgatcgacaagctgaactacctggtgttcaaggaacggggggccacccaggcaggcggatacctgaacgcctaccagctggccgcaccattcgagagcttcgaaaaactgggcaagcagaccggcatcctgtactacgtgcggagcgactacaccagcaagatcgaccccgccacaggcttcgtggacttcctgaagcccaaatacgaaagcatggcaaagagcaaagtgttcttcgagagcttcgaaagaatccagtggaaccaggccaaaggctacttcgagttcgaattcgactacaagaaaatgtgccccagcaggaagttcggcgactaccgcacccggtgggtggtgtgcacattcggcgacacacggtaccagaacaggcgcaacaaaagcagcggccaatgggagaccgagacaatcgacgtgaccgcccagctgaaggccctgttcgcggcctacggcatcacctacaaccaggaggacaacatcaaggacgccatcgcagccgtgaagtacacaaaattctacaaacagctgtactggctgctgagactgacgctgagcctgcggcacagcgtgaccgggaccgacgaggacttcatcctgagccccgtggccgacgagaacggcgtgttcttcgacagcaggaaggccacggacaaacagcccaaggacgcagacgcgaacggcgcctaccacatcgccctgaagggactgtggaacctgcagcagatcaggcagcacgactggaacgtggaaaaaccaaaaaagctgaacctggccatgaaaaacgaagagtggttcggcttcgcacagaagaagaaattcagggcctctggcggaaaaagacctgccgccacaaagaaagccggacaggccaagaaaaagaagtgaccacacccccattcccccactccagatagaacttcagttatatctcacgtgtctggagttggatccaaaaaaaaaaaaaaaaaaaaaaaaaaaaaaaaaaaaaaaaaaaaaaaaaaaaaaaaaaaaaaaaaaaaaaaaaaaaaaaaaaaaaaaaaaaaaaaaaaaaaaaaaaa

SEQ ID NO: 4427 - RNA, 4220 nt, unidentified
  source 1..4220: mol_type = mRNA; note = MG29-1 S168R mRNA sequence
taatacgactcactataaggaaaagccagctccagcaggcgctgctcactcctccccatcctctccctctgtccctctgtccctctgaccctgcactgtcccagcaccatggcccccaagaagaagcggaaagttggcggcggaggcagcttcaacaacttcatcaagaaatacagcctgcagaagaccctgcggttcgaactgaagcccgtgggcgagacagcggactacatcgaagacttcaagagcgaatacctgaaggacacggtgctgaaggacgaacagcgggcaaaagactaccaggagatcaaaacactgatcgacgactaccaccgggagtacatcgaagaatgcctgagggaacccgtggacaaaaagaccggcgagatcctggacttcacacaggacctggaagacgcattcagctactaccagaaactgaaagaaaaccccaccgagaaccgagtggggtgggagaaagagcaggagagcctgagaaagaagctggtgaccagcttcgtggggaacgacggcctgttcaagaaagagttcatcacccgcgacctgcccgaatggctgcagaaaaaggggctgtggggcgaatacaaggacaccgtggagaacttcaaaaaattcaccacctacttcaggggcttccacgagaacaggaagaatatgtacacagccgaagcccagagcacagccatcgccaacaggctgatgaacgacaacctgcccaagttcttcaacaactacctggcataccagaccatcaaggagaaacaccccgacctggtgttccgactggacgacgccctgctgcaggccgccggcgtggagcacctggacgaggcattccagcccagatacttcagcagactgttcgcacagagcggaatcacggccttcaacgagctgatcggaggaaggaccacggaaaacggcgaaaagatccagggcctgaacgagcagatcaacctgtacagacagcagaaccccgagaaggccaagggcttcccaagattcatgcccctgttcaagcaaatcctgagcgacagggagacccacagcttcctgcccgacgcattcgaaaacgacaaagagctgctgcaggccctgagggactacgtggacgccgccaccagcgaagaaggaatgatcagccaactgaacaaggccatgaaccagttcgtgaccgccgacctgaaaagggtgtacatcaaaagcgccgccctgaccagcctgagccaggaactgttccacttcttcggcgtgatcagcgacgccatcgcgtggtacgccgagaagagactgagccccaagaaagcccaggagagcttcctgaaacaggaagtgtacgccatcgaagaactgaaccaggccgtggtgggctacatcgaccagctggaagaccagagcgagctgcagcagctgctggtggacctgccagacccccagaaaccagtgagcagcttcatcctgacccactggcaaaaaagccaggagccgctgcaggccgtgatcgcgaaggtggaacccctgttcgaactggaggagctgagcaaaaacaaacgggccccgaaacacgacaaggaccagggaggggaaggcttccagcaggtggacgcaatcaagaacatgctggacgcattcatggaggtgagccacgccatcaagcccctgtacctggtgaagggccggaaagcaatcgacatgccggacgtggacacaggattctacgccgacttcgcggaggcatacagcgcctacgagcaagtgacggtgagcctgtacaacaagacccgaaaccacctgagcaagaaacccttcagcaaagacaaaatcaaaatcaacttcgacgccccaacactgctgaacggctgggacctgaacaaggaaagcgacaacaaaagcatcatcctgagaaaagacggaaacttctacctggccatcatgcaccccaaacacacaaaggtgttcgactgctacagcgccagcgaggcggccgggaaatgctacgagaaaatgaactacaaactgctgagcggcgccaacaagatgctgcccaaagtgttcttcagcaagaagggaatcgaaaccttcagcccaccccaggaaatcctggacctgtacaagaacaacgaacacaagaagggagccaccttcaagctggagagctgccacaagctgatcgacttcttcaagcggaacatccccaagtacaaggtgcacccaaccgacaacttcggatgggacgtcttcggattccacttcagcccaaccagcagctacggcgacctgagcggcttctaccgagaggtggaagcccaggggtacaaactgtggttcagcgacgtgagcgaggcatacatcaacaagtgcgtggaagagggcaaactgttcctgttccagatctacaacaaggacttcagccccaacagcaccgggaagccaaacctgcacacactgtactggaaaggactgttcgaacccgagaacctgaaggacgtggtgctgaaactgaacggcgaggccgagatcttctacaggaaacacagcatcaagcacgaggacaagacgatccaccgggccaaggacccaatcgccaacaaaaacgcagacaaccccaagaagcagagcgtgttcgactacgacatcatcaaggacaagcgctacacccaggacaaattcttcttccacgtgcccatcagcctgaacttcaagagccagggagtggtgcggttcaacgacaagatcaacggcctgctggccgcacaggacgacgtgcacgtgatcgggatcgaccgaggggaacgccacctgctgtactacaccgtggtgaacggcaagggcgaggtggtggaacagggcagcctgaaccaggtggccacagaccaggggtacgtggtggactaccaacagaaactgcacgccaaagagaaggagagagaccaggccaggaagaactggagcaccatcgaaaacatcaaggagctgaaggccgggtacctgagccaggtggtgcacaaactggcccagctgatcgtgaaacacaacgccatcgtgtgcctggaggacctgaacttcggattcaagaggggacggttcaaagtggagaagcaggtgtaccagaagttcgagaaagccctgatcgacaagctgaactacctggtgttcaaggaacggggggccacccaggcaggcggatacctgaacgcctaccagctggccgcaccattcgagagcttcgaaaaactgggcaagcagaccggcatcctgtactacgtgcggagcgactacaccagcaagatcgaccccgccacaggcttcgtggacttcctgaagcccaaatacgaaagcatggcaaagagcaaagtgttcttcgagagcttcgaaagaatccagtggaaccaggccaaaggctacttcgagttcgaattcgactacaagaaaatgtgccccagcaggaagttcggcgactaccgcacccggtgggtggtgtgcacattcggcgacacacggtaccagaacaggcgcaacaaaagcagcggccaatgggagaccgagacaatcgacgtgaccgcccagctgaaggccctgttcgcggcctacggcatcacctacaaccaggaggacaacatcaaggacgccatcgcagccgtgaagtacacaaaattctacaaacagctgtactggctgctgagactgacgctgagcctgcggcacagcgtgaccgggaccgacgaggacttcatcctgagccccgtggccgacgagaacggcgtgttcttcgacagcaggaaggccacggacaaacagcccaaggacgcagacgcgaacggcgcctaccacatcgccctgaagggactgtggaacctgcagcagatcaggcagcacgactggaacgtggaaaaaccaaaaaagctgaacctggccatgaaaaacgaagagtggttcggcttcgcacagaagaagaaattcagggcctctggcggaaaaagacctgccgccacaaagaaagccggacaggccaagaaaaagaagtgaccacacccccattcccccactccagatagaacttcagttatatctcacgtgtctggagttggatccaaaaaaaaaaaaaaaaaaaaaaaaaaaaaaaaaaaaaaaaaaaaaaaaaaaaaaaaaaaaaaaaaaaaaaaaaaaaaaaaaaaaaaaaaaaaaaaaaaaaaaaaaaa

SEQ ID NO: 4428 - RNA, 42 nt, synthetic construct
  misc_feature 1..42: note = Category: MG29-1 sgRNA targeting CD38
  misc_feature 1..42: note = Description: MG29-1-CD38-sgRNA-A1
  source 1..42: mol_type = other RNA
taatttctactgttgtagatccgagaccgtcctggcgcgatg

SEQ ID NO: 4429 - RNA, 42 nt, synthetic construct
  misc_feature 1..42: note = Category: MG29-1 sgRNA targeting CD38
  misc_feature 1..42: note = Description: MG29-1-CD38-sgRNA-B1
  source 1..42: mol_type = other RNA
taatttctactgttgtagatagtgtacttgacgcatcgcgcc

SEQ ID NO: 4430 - RNA, 42 nt, synthetic construct
  misc_feature 1..42: note = Category: MG29-1 sgRNA targeting CD38
  misc_feature 1..42: note = Description: MG29-1-CD38-sgRNA-C1
  source 1..42: mol_type = other RNA
taatttctactgttgtagattccccggacaccgggctgaact

SEQ ID NO: 4431 - RNA, 42 nt, synthetic construct
  misc_feature 1..42: note = Category: MG29-1 sgRNA targeting CD38
  misc_feature 1..42: note = Description: MG29-1-CD38-sgRNA-D1
  source 1..42: mol_type = other RNA
taatttctactgttgtagataagggtgcatttatttcaaaac

SEQ ID NO: 4432 - RNA, 42 nt, synthetic construct
  misc_feature 1..42: note = Category: MG29-1 sgRNA targeting CD38
  misc_feature 1..42: note = Description: MG29-1-CD38-sgRNA-E1
  source 1..42: mol_type = other RNA
taatttctactgttgtagattttcaaaacatccttgcaacat

SEQ ID NO: 4433 - RNA, 42 nt, synthetic construct
  misc_feature 1..42: note = Category: MG29-1 sgRNA targeting CD38
  misc_feature 1..42: note = Description: MG29-1-CD38-sgRNA-F1
  source 1..42: mol_type = other RNA
taatttctactgttgtagataaaacatccttgcaacattact

SEQ ID NO: 4434 - RNA, 42 nt, synthetic construct
  misc_feature 1..42: note = Category: MG29-1 sgRNA targeting CD38
  misc_feature 1..42: note = Description: MG29-1-CD38-sgRNA-G1
  source 1..42: mol_type = other RNA
taatttctactgttgtagatgaaataaatgcacccttgaaag

SEQ ID NO: 4435 - RNA, 42 nt, synthetic construct
  misc_feature 1..42: note = Category: MG29-1 sgRNA targeting CD38
  misc_feature 1..42: note = Description: MG29-1-CD38-sgRNA-H1
  source 1..42: mol_type = other RNA
taatttctactgttgtagataaataaatgcacccttgaaagc

SEQ ID NO: 4436 - RNA, 42 nt, synthetic construct
  misc_feature 1..42: note = Category: MG29-1 sgRNA targeting CD38
  misc_feature 1..42: note = Description: MG29-1-CD38-sgRNA-A2
  source 1..42: mol_type = other RNA
taatttctactgttgtagatgcagtctacatgtctgagataa

SEQ ID NO: 4437 - RNA, 42 nt, synthetic construct
  misc_feature 1..42: note = Category: MG29-1 sgRNA targeting CD38
  misc_feature 1..42: note = Description: MG29-1-CD38-sgRNA-B2
  source 1..42: mol_type = other RNA
taatttctactgttgtagatgagcagaataaaagatctggcc

SEQ ID NO: 4438 - RNA, 42 nt, synthetic construct
  misc_feature 1..42: note = Category: MG29-1 sgRNA targeting CD38
  misc_feature 1..42: note = Description: MG29-1-CD38-sgRNA-C2
  source 1..42: mol_type = other RNA
taatttctactgttgtagatattctgctccaaagaagaatct

SEQ ID NO: 4439 - RNA, 42 nt, synthetic construct
  misc_feature 1..42: note = Category: MG29-1 sgRNA targeting CD38
  misc_feature 1..42: note = Description: MG29-1-CD38-sgRNA-D2
  source 1..42: mol_type = other RNA
taatttctactgttgtagatttctgctccaaagaagaatcta

SEQ ID NO: 4440 - RNA, 42 nt, synthetic construct
  misc_feature 1..42: note = Category: MG29-1 sgRNA targeting CD38
  misc_feature 1..42: note = Description: MG29-1-CD38-sgRNA-E2
  source 1..42: mol_type = other RNA
taatttctactgttgtagatagtattctggaaaacggtttcc

SEQ ID NO: 4441 - RNA, 42 nt, synthetic construct
  misc_feature 1..42: note = Category: MG29-1 sgRNA targeting CD38
  misc_feature 1..42: note = Description: MG29-1-CD38-sgRNA-F2
  source 1..42: mol_type = other RNA
taatttctactgttgtagatccgcagggtaagtaccaagtag

SEQ ID NO: 4442 - RNA, 42 nt, synthetic construct
  misc_feature 1..42: note = Category: MG29-1 sgRNA targeting CD38
  misc_feature 1..42: note = Description: MG29-1-CD38-sgRNA-G2
  source 1..42: mol_type = other RNA
taatttctactgttgtagatccagaatactgaaacagggttg

SEQ ID NO: 4443 - RNA, 42 nt, synthetic construct
  misc_feature 1..42: note = Category: MG29-1 sgRNA targeting CD38
  misc_feature 1..42: note = Description: MG29-1-CD38-sgRNA-H2
  source 1..42: mol_type = other RNA
taatttctactgttgtagatcagaatactgaaacagggttgt

SEQ ID NO: 4444 - RNA, 42 nt, synthetic construct
  misc_feature 1..42: note = Category: MG29-1 sgRNA targeting CD38
  misc_feature 1..42: note = Description: MG29-1-CD38-sgRNA-A3
  source 1..42: mol_type = other RNA
taatttctactgttgtagattccagtctgggcaagattgata

SEQ ID NO: 4445 - RNA, 42 nt, synthetic construct
  misc_feature 1..42: note = Category: MG29-1 sgRNA targeting CD38
  misc_feature 1..42: note = Description: MG29-1-CD38-sgRNA-B3
  source 1..42: mol_type = other RNA
taatttctactgttgtagattttctaaaagacatagtttgta

SEQ ID NO: 4446 - RNA, 42 nt, synthetic construct
  misc_feature 1..42: note = Category: MG29-1 sgRNA targeting CD38
  misc_feature 1..42: note = Description: MG29-1-CD38-sgRNA-C3
  source 1..42: mol_type = other RNA
taatttctactgttgtagatcagaagctgcctgtgatgtggt

SEQ ID NO: 4447 - RNA, 42 nt, synthetic construct
  misc_feature 1..42: note = Category: MG29-1 sgRNA targeting CD38
  misc_feature 1..42: note = Description: MG29-1-CD38-sgRNA-D3
  source 1..42: mol_type = other RNA
taatttctactgttgtagatacaaaaacaggtacacatttat

SEQ ID NO: 4448 - RNA, 42 nt, synthetic construct
  misc_feature 1..42: note = Category: MG29-1 sgRNA targeting CD38
  misc_feature 1..42: note = Description: MG29-1-CD38-sgRNA-E3
  source 1..42: mol_type = other RNA
taatttctactgttgtagattgtcaaagattttactgcggga

SEQ ID NO: 4449 - RNA, 42 nt, synthetic construct
  misc_feature 1..42: note = Category: MG29-1 sgRNA targeting CD38
  misc_feature 1..42: note = Description: MG29-1-CD38-sgRNA-F3
  source 1..42: mol_type = other RNA
taatttctactgttgtagatgtcaaagattttactgcgggat

SEQ ID NO: 4450 - RNA, 42 nt, synthetic construct
  misc_feature 1..42: note = Category: MG29-1 sgRNA targeting CD38
  misc_feature 1..42: note = Description: MG29-1-CD38-sgRNA-G3
  source 1..42: mol_type = other RNA
taatttctactgttgtagattcaaagattttactgcgggatc

SEQ ID NO: 4451 - RNA, 42 nt, synthetic construct
  misc_feature 1..42: note = Category: MG29-1 sgRNA targeting CD38
  misc_feature 1..42: note = Description: MG29-1-CD38-sgRNA-H3
  source 1..42: mol_type = other RNA
taatttctactgttgtagatactgcgggatccattgagcatc

SEQ ID NO: 4452 - RNA, 42 nt, synthetic construct
  misc_feature 1..42: note = Category: MG29-1 sgRNA targeting CD38
  misc_feature 1..42: note = Description: MG29-1-CD38-sgRNA-A4
  source 1..42: mol_type = other RNA
taatttctactgttgtagatctgcgggatccattgagcatca

SEQ ID NO: 4453 - RNA, 42 nt, synthetic construct
  misc_feature 1..42: note = Category: MG29-1 sgRNA targeting CD38
  misc_feature 1..42: note = Description: MG29-1-CD38-sgRNA-B4
  source 1..42: mol_type = other RNA
taatttctactgttgtagatgggagtgtggaagtccataatt

SEQ ID NO: 4454 - RNA, 42 nt, synthetic construct
  misc_feature 1..42: note = Category: MG29-1 sgRNA targeting CD38
  misc_feature 1..42: note = Description: MG29-1-CD38-sgRNA-C4
  source 1..42: mol_type = other RNA
taatttctactgttgtagatggagtgtggaagtccataattt

SEQ ID NO: 4455 - RNA, 42 nt, synthetic construct
  misc_feature 1..42: note = Category: MG29-1 sgRNA targeting CD38
  misc_feature 1..42: note = Description: MG29-1-CD38-sgRNA-D4
  source 1..42: mol_type = other RNA
taatttctactgttgtagatcaaccagagaaggttcagacac

SEQ ID NO: 4456 - RNA, 42 nt, synthetic construct
  misc_feature 1..42: note = Category: MG29-1 sgRNA targeting CD38
  misc_feature 1..42: note = Description: MG29-1-CD38-sgRNA-E4
  source 1..42: mol_type = other RNA
taatttctactgttgtagatcctgcaagaatatctacaggta

SEQ ID NO: 4457 - RNA, 42 nt, synthetic construct
  misc_feature 1..42: note = Category: MG29-1 sgRNA targeting CD38
  misc_feature 1..42: note = Description: MG29-1-CD38-sgRNA-F4
  source 1..42: mol_type = other RNA
taatttctactgttgtagatctgcaagaatatctacaggtaa

SEQ ID NO: 4458 - RNA, 42 nt, synthetic construct
  misc_feature 1..42: note = Category: MG29-1 sgRNA targeting CD38
  misc_feature 1..42: note = Description: MG29-1-CD38-sgRNA-G4
  source 1..42: mol_type = other RNA
taatttctactgttgtagatgcttataatcgattccagctct

SEQ ID NO: 4459 - RNA, 42 nt, synthetic construct
  misc_feature 1..42: note = Category: MG29-1 sgRNA targeting CD38
  misc_feature 1..42: note = Description: MG29-1-CD38-sgRNA-H4
  source 1..42: mol_type = other RNA
taatttctactgttgtagatcttataatcgattccagctctt

SEQ ID NO: 4460 - RNA, 42 nt, synthetic construct
  misc_feature 1..42: note = Category: MG29-1 sgRNA targeting CD38
  misc_feature 1..42: note = Description: MG29-1-CD38-sgRNA-A5
  source 1..42: mol_type = other RNA
taatttctactgttgtagatatggtgggatcctggcataagt

SEQ ID NO: 4461 - RNA, 42 nt, synthetic construct
  misc_feature 1..42: note = Category: MG29-1 sgRNA targeting CD38
  misc_feature 1..42: note = Description: MG29-1-CD38-sgRNA-B5
  source 1..42: mol_type = other RNA
taatttctactgttgtagattggtgggatcctggcataagtc

SEQ ID NO: 4462 - RNA, 42 nt, synthetic construct
  misc_feature 1..42: note = Category: MG29-1 sgRNA targeting CD38
  misc_feature 1..42: note = Description: MG29-1-CD38-sgRNA-C5
  source 1..42: mol_type = other RNA
taatttctactgttgtagatttcagtgtgtgaaaaatcctga

SEQ ID NO: 4463 - RNA, 42 nt, synthetic construct
  misc_feature 1..42: note = Category: MG29-1 sgRNA targeting CD38
  misc_feature 1..42: note = Description: MG29-1-CD38-sgRNA-D5
  source 1..42: mol_type = other RNA
taatttctactgttgtagattcacacactgaagaaacttgtc

SEQ ID NO: 4464 - RNA, 42 nt, synthetic construct
  misc_feature 1..42: note = Category: MG29-1 sgRNA targeting CD38
  misc_feature 1..42: note = Description: MG29-1-CD38-sgRNA-E5
  source 1..42: mol_type = other RNA
taatttctactgttgtagatcacacactgaagaaacttgtca

SEQ ID NO: 4465 - RNA, 42 nt, synthetic construct
  misc_feature 1..42: note = Category: MG29-1 sgRNA targeting CD38
  misc_feature 1..42: note = Description: MG29-1-CD38-sgRNA-F5
  source 1..42: mol_type = other RNA
taatttctactgttgtagatacacactgaagaaacttgtcag

SEQ ID NO: 4466 - DNA, 22 bp, unidentified
  misc_feature 1..22: note = Description of Unknown:MG29-1-CD38-target site-A1 sequence
  misc_feature 1..22: note = Category: DNA sequence of CD38 target site
  source 1..22: mol_type = genomic DNA; note = uncultivated organism sequence
ccgagaccgtcctggcgcgatg

SEQ ID NO: 4467 - DNA, 22 bp, unidentified
  misc_feature 1..22: note = Description of Unknown:MG29-1-CD38-target site-B1 sequence
  misc_feature 1..22: note = Category: DNA sequence of CD38 target site
  source 1..22: mol_type = genomic DNA; note = uncultivated organism sequence
agtgtacttgacgcatcgcgcc

SEQ ID NO: 4468 - DNA, 22 bp, unidentified
  misc_feature 1..22: note = Description of Unknown:MG29-1-CD38-target site-C1 sequence
  misc_feature 1..22: note = Category: DNA sequence of CD38 target site
  source 1..22: mol_type = genomic DNA; note = uncultivated organism sequence
tccccggacaccgggctgaact

SEQ ID NO: 4469 - DNA, 22 bp, unidentified
  misc_feature 1..22: note = Description of Unknown:MG29-1-CD38-target site-D1 sequence
  misc_feature 1..22: note = Category: DNA sequence of CD38 target site
  source 1..22: mol_type = genomic DNA; note = uncultivated organism sequence
aagggtgcatttatttcaaaac

SEQ ID NO: 4470 - DNA, 22 bp, unidentified
  misc_feature 1..22: note = Description of Unknown:MG29-1-CD38-target site-E1 sequence
  misc_feature 1..22: note = Category: DNA sequence of CD38 target site
  source 1..22: mol_type = genomic DNA; note = uncultivated organism sequence
tttcaaaacatccttgcaacat

SEQ ID NO: 4471 - DNA, 22 bp, unidentified
  misc_feature 1..22: note = Description of Unknown:MG29-1-CD38-target site-F1 sequence
  misc_feature 1..22: note = Category: DNA sequence of CD38 target site
  source 1..22: mol_type = genomic DNA; note = uncultivated organism sequence
aaaacatccttgcaacattact

SEQ ID NO: 4472 - DNA, 22 bp, unidentified
  misc_feature 1..22: note = Description of Unknown:MG29-1-CD38-target site-G1 sequence
  misc_feature 1..22: note = Category: DNA sequence of CD38 target site
  source 1..22: mol_type = genomic DNA; note = uncultivated organism sequence
gaaataaatgcacccttgaaag

SEQ ID NO: 4473 - DNA, 22 bp, unidentified
  misc_feature 1..22: note = Description of Unknown:MG29-1-CD38-target site-H1 sequence
  misc_feature 1..22: note = Category: DNA sequence of CD38 target site
  source 1..22: mol_type = genomic DNA; note = uncultivated organism sequence
aaataaatgcacccttgaaagc

SEQ ID NO: 4474 - DNA, 22 bp, unidentified
  misc_feature 1..22: note = Description of Unknown:MG29-1-CD38-target site-A2 sequence
  misc_feature 1..22: note = Category: DNA sequence of CD38 target site
  source 1..22: mol_type = genomic DNA; note = uncultivated organism sequence
gcagtctacatgtctgagataa

SEQ ID NO: 4475 - DNA, 22 bp, unidentified
  misc_feature 1..22: note = Description of Unknown:MG29-1-CD38-target site-B2 sequence
  misc_feature 1..22: note = Category: DNA sequence of CD38 target site
  source 1..22: mol_type = genomic DNA; note = uncultivated organism sequence
gagcagaataaaagatctggcc

SEQ ID NO: 4476 - DNA, 22 bp, unidentified
  misc_feature 1..22: note = Description of Unknown:MG29-1-CD38-target site-C2 sequence
  misc_feature 1..22: note = Category: DNA sequence of CD38 target site
  source 1..22: mol_type = genomic DNA; note = uncultivated organism sequence
attctgctccaaagaagaatct

SEQ ID NO: 4477 - DNA, 22 bp, unidentified
  misc_feature 1..22: note = Description of Unknown:MG29-1-CD38-target site-D2 sequence
  misc_feature 1..22: note = Category: DNA sequence of CD38 target site
  source 1..22: mol_type = genomic DNA; note = uncultivated organism sequence
ttctgctccaaagaagaatcta

SEQ ID NO: 4478 - DNA, 22 bp, unidentified
  misc_feature 1..22: note = Description of Unknown:MG29-1-CD38-target site-E2 sequence
  misc_feature 1..22: note = Category: DNA sequence of CD38 target site
  source 1..22: mol_type = genomic DNA; note = uncultivated organism sequence
agtattctggaaaacggtttcc

SEQ ID NO: 4479 - DNA, 22 bp, unidentified
  misc_feature 1..22: note = Description of Unknown:MG29-1-CD38-target site-F2 sequence
  misc_feature 1..22: note = Category: DNA sequence of CD38 target site
  source 1..22: mol_type = genomic DNA; note = uncultivated organism sequence
ccgcagggtaagtaccaagtag

SEQ ID NO: 4480 - DNA, 22 bp, unidentified
  misc_feature 1..22: note = Description of Unknown:MG29-1-CD38-target site-G2 sequence
  misc_feature 1..22: note = Category: DNA sequence of CD38 target site
  source 1..22: mol_type = genomic DNA; note = uncultivated organism sequence
ccagaatactgaaacagggttg

SEQ ID NO: 4481 - DNA, 22 bp, unidentified
  misc_feature 1..22: note = Description of Unknown:MG29-1-CD38-target site-H2 sequence
  misc_feature 1..22: note = Category: DNA sequence of CD38 target site
  source 1..22: mol_type = genomic DNA; note = uncultivated organism sequence
cagaatactgaaacagggttgt

SEQ ID NO: 4482 - DNA, 22 bp, unidentified
  misc_feature 1..22: note = Description of Unknown:MG29-1-CD38-target site-A3 sequence
  misc_feature 1..22: note = Category: DNA sequence of CD38 target site
  source 1..22: mol_type = genomic DNA; note = uncultivated organism sequence
tccagtctgggcaagattgata

SEQ ID NO: 4483 - DNA, 22 bp, unidentified
  misc_feature 1..22: note = Description of Unknown:MG29-1-CD38-target site-B3 sequence
  misc_feature 1..22: note = Category: DNA sequence of CD38 target site
  source 1..22: mol_type = genomic DNA; note = uncultivated organism sequence
tttctaaaagacatagtttgta

SEQ ID NO: 4484 - DNA, 22 bp, unidentified
  misc_feature 1..22: note = Description of Unknown:MG29-1-CD38-target site-C3 sequence
  misc_feature 1..22: note = Category: DNA sequence of CD38 target site
  source 1..22: mol_type = genomic DNA; note = uncultivated organism sequence
cagaagctgcctgtgatgtggt

SEQ ID NO: 4485 - DNA, 22 bp, unidentified
  misc_feature 1..22: note = Description of Unknown:MG29-1-CD38-target site-D3 sequence
  misc_feature 1..22: note = Category: DNA sequence of CD38 target site
  source 1..22: mol_type = genomic DNA; note = uncultivated organism sequence
acaaaaacaggtacacatttat

SEQ ID NO: 4486 - DNA, 22 bp, unidentified
  misc_feature 1..22: note = Description of Unknown:MG29-1-CD38-target site-E3 sequence
  misc_feature 1..22: note = Category: DNA sequence of CD38 target site
  source 1..22: mol_type = genomic DNA; note = uncultivated organism sequence
tgtcaaagattttactgcggga

SEQ ID NO: 4487 - DNA, 22 bp, unidentified
  misc_feature 1..22: note = Description of Unknown:MG29-1-CD38-target site-F3 sequence
  misc_feature 1..22: note = Category: DNA sequence of CD38 target site
  source 1..22: mol_type = genomic DNA; note = uncultivated organism sequence
gtcaaagattttactgcgggat

SEQ ID NO: 4488 - DNA, 22 bp, unidentified
  misc_feature 1..22: note = Description of Unknown:MG29-1-CD38-target site-G3 sequence
  misc_feature 1..22: note = Category: DNA sequence of CD38 target site
  source 1..22: mol_type = genomic DNA; note = uncultivated organism sequence
tcaaagattttactgcgggatc

SEQ ID NO: 4489 - DNA, 22 bp, unidentified
  misc_feature 1..22: note = Description of Unknown:MG29-1-CD38-target site-H3 sequence
  misc_feature 1..22: note = Category: DNA sequence of CD38 target site
  source 1..22: mol_type = genomic DNA; note = uncultivated organism sequence
actgcgggatccattgagcatc

SEQ ID NO: 4490 - DNA, 22 bp, unidentified
  misc_feature 1..22: note = Description of Unknown:MG29-1-CD38-target site-A4 sequence
  misc_feature 1..22: note = Category: DNA sequence of CD38 target site
  source 1..22: mol_type = genomic DNA; note = uncultivated organism sequence
ctgcgggatccattgagcatca

SEQ ID NO: 4491 - DNA, 22 bp, unidentified
  misc_feature 1..22: note = Description of Unknown:MG29-1-CD38-target site-B4 sequence
  misc_feature 1..22: note = Category: DNA sequence of CD38 target site
  source 1..22: mol_type = genomic DNA; note = uncultivated organism sequence
gggagtgtggaagtccataatt

SEQ ID NO: 4492 - DNA, 22 bp, unidentified
  misc_feature 1..22: note = Description of Unknown:MG29-1-CD38-target site-C4 sequence
  misc_feature 1..22: note = Category: DNA sequence of CD38 target site
  source 1..22: mol_type = genomic DNA; note = uncultivated organism sequence
ggagtgtggaagtccataattt

SEQ ID NO: 4493 - DNA, 22 bp, unidentified
  misc_feature 1..22: note = Description of Unknown:MG29-1-CD38-target site-D4 sequence
  misc_feature 1..22: note = Category: DNA sequence of CD38 target site
  source 1..22: mol_type = genomic DNA; note = uncultivated organism sequence
caaccagagaaggttcagacac

SEQ ID NO: 4494 - DNA, 22 bp, unidentified
  misc_feature 1..22: note = Description of Unknown:MG29-1-CD38-target site-E4 sequence
  misc_feature 1..22: note = Category: DNA sequence of CD38 target site
  source 1..22: mol_type = genomic DNA; note = uncultivated organism sequence
cctgcaagaatatctacaggta

SEQ ID NO: 4495 - DNA, 22 bp, unidentified
  misc_feature 1..22: note = Description of Unknown:MG29-1-CD38-target site-F4 sequence
  misc_feature 1..22: note = Category: DNA sequence of CD38 target site
  source 1..22: mol_type = genomic DNA; note = uncultivated organism sequence
ctgcaagaatatctacaggtaa

SEQ ID NO: 4496 - DNA, 22 bp, unidentified
  misc_feature 1..22: note = Description of Unknown:MG29-1-CD38-target site-G4 sequence
  misc_feature 1..22: note = Category: DNA sequence of CD38 target site
  source 1..22: mol_type = genomic DNA; note = uncultivated organism sequence
gcttataatcgattccagctct

SEQ ID NO: 4497 - DNA, 22 bp, unidentified
  misc_feature 1..22: note = Description of Unknown:MG29-1-CD38-target site-H4 sequence
  misc_feature 1..22: note = Category: DNA sequence of CD38 target site
  source 1..22: mol_type = genomic DNA; note = uncultivated organism sequence
cttataatcgattccagctctt

SEQ ID NO: 4498 - DNA, 22 bp, unidentified
  misc_feature 1..22: note = Description of Unknown:MG29-1-CD38-target site-A5 sequence
  misc_feature 1..22: note = Category: DNA sequence of CD38 target site
  source 1..22: mol_type = genomic DNA; note = uncultivated organism sequence
atggtgggatcctggcataagt

SEQ ID NO: 4499 - DNA, 22 bp, unidentified
  misc_feature 1..22: note = Description of Unknown:MG29-1-CD38-target site-B5 sequence
  misc_feature 1..22: note = Category: DNA sequence of CD38 target site
  source 1..22: mol_type = genomic DNA; note = uncultivated organism sequence
tggtgggatcctggcataagtc

SEQ ID NO: 4500 - DNA, 22 bp, unidentified
  misc_feature 1..22: note = Description of Unknown:MG29-1-CD38-target site-C5 sequence
  misc_feature 1..22: note = Category: DNA sequence of CD38 target site
  source 1..22: mol_type = genomic DNA; note = uncultivated organism sequence
ttcagtgtgtgaaaaatcctga

SEQ ID NO: 4501 - DNA, 22 bp, unidentified
  misc_feature 1..22: note = Description of Unknown:MG29-1-CD38-target site-D5 sequence
  misc_feature 1..22: note = Category: DNA sequence of CD38 target site
  source 1..22: mol_type = genomic DNA; note = uncultivated organism sequence
tcacacactgaagaaacttgtc

SEQ ID NO: 4502 - DNA, 22 bp, unidentified
  misc_feature 1..22: note = Description of Unknown:MG29-1-CD38-target site-E5 sequence
  misc_feature 1..22: note = Category: DNA sequence of CD38 target site
  source 1..22: mol_type = genomic DNA; note = uncultivated organism sequence
cacacactgaagaaacttgtca

SEQ ID NO: 4503 - DNA, 22 bp, unidentified
  misc_feature 1..22: note = Description of Unknown:MG29-1-CD38-target site-F5 sequence
  misc_feature 1..22: note = Category: DNA sequence of CD38 target site
  source 1..22: mol_type = genomic DNA; note = uncultivated organism sequence
acacactgaagaaacttgtcag

SEQ ID NO: 4504 - RNA, 42 nt, synthetic construct
  misc_feature 1..42: note = Category: MG29-1 sgRNA targeting TIGIT
  misc_feature 1..42: note = Description: MG29-1-TIGIT-sgRNA-A1
  source 1..42: mol_type = other RNA
taatttctactgttgtagataggccttacctgaggcgagggg

SEQ ID NO: 4505 - RNA, 42 nt, synthetic construct
  misc_feature 1..42: note = Category: MG29-1 sgRNA targeting TIGIT
  misc_feature 1..42: note = Description: MG29-1-TIGIT-sgRNA-B1
  source 1..42: mol_type = other RNA
taatttctactgttgtagattattgtgcctgtcatcattcct

SEQ ID NO: 4506 - RNA, 42 nt, synthetic construct
  misc_feature 1..42: note = Category: MG29-1 sgRNA targeting TIGIT
  misc_feature 1..42: note = Description: MG29-1-TIGIT-sgRNA-C1
  source 1..42: mol_type = other RNA
taatttctactgttgtagattctgcagaaatgttccccgttg

SEQ ID NO: 4507 - RNA, 42 nt, synthetic construct
  misc_feature 1..42: note = Category: MG29-1 sgRNA targeting TIGIT
  misc_feature 1..42: note = Description: MG29-1-TIGIT-sgRNA-D1
  source 1..42: mol_type = other RNA
taatttctactgttgtagattgcagagaaaggtggctctatc

SEQ ID NO: 4508 - RNA, 42 nt, synthetic construct
  misc_feature 1..42: note = Category: MG29-1 sgRNA targeting TIGIT
  misc_feature 1..42: note = Description: MG29-1-TIGIT-sgRNA-E1
  source 1..42: mol_type = other RNA
taatttctactgttgtagattaatgctgacttggggtggcac

SEQ ID NO: 4509 - RNA, 42 nt, synthetic construct
  misc_feature 1..42: note = Category: MG29-1 sgRNA targeting TIGIT
  misc_feature 1..42: note = Description: MG29-1-TIGIT-sgRNA-F1
  source 1..42: mol_type = other RNA
taatttctactgttgtagattaggacctccaggaagattctc

SEQ ID NO: 4510 - RNA, 42 nt, synthetic construct
  misc_feature 1..42: note = Category: MG29-1 sgRNA targeting TIGIT
  misc_feature 1..42: note = Description: MG29-1-TIGIT-sgRNA-G1
  source 1..42: mol_type = other RNA
taatttctactgttgtagatgtcctccctctagtggctgagc

SEQ ID NO: 4511 - RNA, 42 nt, synthetic construct
  misc_feature 1..42: note = Category: MG29-1 sgRNA targeting TIGIT
  misc_feature 1..42: note = Description: MG29-1-TIGIT-sgRNA-H1
  source 1..42: mol_type = other RNA
taatttctactgttgtagattcctccctctagtggctgagca

SEQ ID NO: 4512 - RNA, 42 nt, synthetic construct
  misc_feature 1..42: note = Category: MG29-1 sgRNA targeting TIGIT
  misc_feature 1..42: note = Description: MG29-1-TIGIT-sgRNA-A2
  source 1..42: mol_type = other RNA
taatttctactgttgtagattagtcaacgcgaccaccacgat

SEQ ID NO: 4513 - RNA, 42 nt, synthetic construct
  misc_feature 1..42: note = Category: MG29-1 sgRNA targeting TIGIT
  misc_feature 1..42: note = Description: MG29-1-TIGIT-sgRNA-B2
  source 1..42: mol_type = other RNA
taatttctactgttgtagattagtttgtttgtttttagaaga

SEQ ID NO: 4514 - RNA, 42 nt, synthetic construct
  misc_feature 1..42: note = Category: MG29-1 sgRNA targeting TIGIT
  misc_feature 1..42: note = Description: MG29-1-TIGIT-sgRNA-C2
  source 1..42: mol_type = other RNA
taatttctactgttgtagattttgtttttagaagaaagccct

SEQ ID NO: 4515 - RNA, 42 nt, synthetic construct
  misc_feature 1..42: note = Category: MG29-1 sgRNA targeting TIGIT
  misc_feature 1..42: note = Description: MG29-1-TIGIT-sgRNA-D2
  source 1..42: mol_type = other RNA
taatttctactgttgtagattttttagaagaaagccctcaga

SEQ ID NO: 4516 - RNA, 42 nt, synthetic construct
  misc_feature 1..42: note = Category: MG29-1 sgRNA targeting TIGIT
  misc_feature 1..42: note = Description: MG29-1-TIGIT-sgRNA-E2
  source 1..42: mol_type = other RNA
taatttctactgttgtagattagaagaaagccctcagaatcc

SEQ ID NO: 4517 - RNA, 42 nt, synthetic construct
  misc_feature 1..42: note = Category: MG29-1 sgRNA targeting TIGIT
  misc_feature 1..42: note = Description: MG29-1-TIGIT-sgRNA-F2
  source 1..42: mol_type = other RNA
taatttctactgttgtagatagaagaaagccctcagaatcca

SEQ ID NO: 4518 - RNA, 42 nt, synthetic construct
  misc_feature 1..42: note = Category: MG29-1 sgRNA targeting TIGIT
  misc_feature 1..42: note = Description: MG29-1-TIGIT-sgRNA-G2
  source 1..42: mol_type = other RNA
taatttctactgttgtagatgaagaaagccctcagaatccat

SEQ ID NO: 4519 - RNA, 42 nt, synthetic construct
  misc_feature 1..42: note = Category: MG29-1 sgRNA targeting TIGIT
  misc_feature 1..42: note = Description: MG29-1-TIGIT-sgRNA-H2
  source 1..42: mol_type = other RNA
taatttctactgttgtagattcctgaggtcaccttccacaga

SEQ ID NO: 4520 - RNA, 42 nt, synthetic construct
  misc_feature 1..42: note = Category: MG29-1 sgRNA targeting TIGIT
  misc_feature 1..42: note = Description: MG29-1-TIGIT-sgRNA-A3
  source 1..42: mol_type = other RNA
taatttctactgttgtagatctcctgaggtcaccttccacag

SEQ ID NO: 4521 - DNA, 22 bp, unidentified
  misc_feature 1..22: note = Description of Unknown:MG29-1-TIGIT-target site-A1 sequence
  misc_feature 1..22: note = Category: DNA sequence of TIGIT target site
  source 1..22: mol_type = genomic DNA; note = uncultivated organism sequence
aggccttacctgaggcgagggg

SEQ ID NO: 4522 - DNA, 22 bp, unidentified
  misc_feature 1..22: note = Description of Unknown:MG29-1-TIGIT-target site-B1 sequence
  misc_feature 1..22: note = Category: DNA sequence of TIGIT target site
  source 1..22: mol_type = genomic DNA; note = uncultivated organism sequence
tattgtgcctgtcatcattcct

SEQ ID NO: 4523 - DNA, 22 bp, unidentified
  misc_feature 1..22: note = Description of Unknown:MG29-1-TIGIT-target site-C1 sequence
  misc_feature 1..22: note = Category: DNA sequence of TIGIT target site
  source 1..22: mol_type = genomic DNA; note = uncultivated organism sequence
tctgcagaaatgttccccgttg

SEQ ID NO: 4524 - DNA, 22 bp, unidentified
  misc_feature 1..22: note = Description of Unknown:MG29-1-TIGIT-target site-D1 sequence
  misc_feature 1..22: note = Category: DNA sequence of TIGIT target site
  source 1..22: mol_type = genomic DNA; note = uncultivated organism sequence
tgcagagaaaggtggctctatc

SEQ ID NO: 4525 - DNA, 22 bp, unidentified
  misc_feature 1..22: note = Description of Unknown:MG29-1-TIGIT-target site-E1 sequence
  misc_feature 1..22: note = Category: DNA sequence of TIGIT target site
  source 1..22: mol_type = genomic DNA; note = uncultivated organism sequence
taatgctgacttggggtggcac

SEQ ID NO: 4526 - DNA, 22 bp, unidentified
  misc_feature 1..22: note = Description of Unknown:MG29-1-TIGIT-target site-F1 sequence
  misc_feature 1..22: note = Category: DNA sequence of TIGIT target site
  source 1..22: mol_type = genomic DNA; note = uncultivated organism sequence
taggacctccaggaagattctc

SEQ ID NO: 4527 - DNA, 22 bp, unidentified
  misc_feature 1..22: note = Description of Unknown:MG29-1-TIGIT-target site-G1 sequence
  misc_feature 1..22: note = Category: DNA sequence of TIGIT target site
  source 1..22: mol_type = genomic DNA; note = uncultivated organism sequence
gtcctccctctagtggctgagc

SEQ ID NO: 4528 - DNA, 22 bp, unidentified
  misc_feature 1..22: note = Description of Unknown:MG29-1-TIGIT-target site-H1 sequence
  misc_feature 1..22: note = Category: DNA sequence of TIGIT target site
  source 1..22: mol_type = genomic DNA; note = uncultivated organism sequence
tcctccctctagtggctgagca

SEQ ID NO: 4529 - DNA, 22 bp, unidentified
  misc_feature 1..22: note = Description of Unknown:MG29-1-TIGIT-target site-A2 sequence
  misc_feature 1..22: note = Category: DNA sequence of TIGIT target site
  source 1..22: mol_type = genomic DNA; note = uncultivated organism sequence
tagtcaacgcgaccaccacgat

SEQ ID NO: 4530 - DNA, 22 bp, unidentified
  misc_feature 1..22: note = Description of Unknown:MG29-1-TIGIT-target site-B2 sequence
  misc_feature 1..22: note = Category: DNA sequence of TIGIT target site
  source 1..22: mol_type = genomic DNA; note = uncultivated organism sequence
tagtttgtttgtttttagaaga

SEQ ID NO: 4531 - DNA, 22 bp, unidentified
  misc_feature 1..22: note = Description of Unknown:MG29-1-TIGIT-target site-C2 sequence
  misc_feature 1..22: note = Category: DNA sequence of TIGIT target site
  source 1..22: mol_type = genomic DNA; note = uncultivated organism sequence
tttgtttttagaagaaagccct

SEQ ID NO: 4532 - DNA, 22 bp, unidentified
  misc_feature 1..22: note = Description of Unknown:MG29-1-TIGIT-target site-D2 sequence
  misc_feature 1..22: note = Category: DNA sequence of TIGIT target site
  source 1..22: mol_type = genomic DNA; note = uncultivated organism sequence
tttttagaagaaagccctcaga

SEQ ID NO: 4533 - DNA, 22 bp, unidentified
  misc_feature 1..22: note = Description of Unknown:MG29-1-TIGIT-target site-E2 sequence
  misc_feature 1..22: note = Category: DNA sequence of TIGIT target site
  source 1..22: mol_type = genomic DNA; note = uncultivated organism sequence
tagaagaaagccctcagaatcc

SEQ ID NO: 4534 - DNA, 22 bp, unidentified
  misc_feature 1..22: note = Description of Unknown:MG29-1-TIGIT-target site-F2 sequence
  misc_feature 1..22: note = Category: DNA sequence of TIGIT target site
  source 1..22: mol_type = genomic DNA; note = uncultivated organism sequence
agaagaaagccctcagaatcca

SEQ ID NO: 4535 - DNA, 22 bp, unidentified
  misc_feature 1..22: note = Description of Unknown:MG29-1-TIGIT-target site-G2 sequence
  misc_feature 1..22: note = Category: DNA sequence of TIGIT target site
  source 1..22: mol_type = genomic DNA; note = uncultivated organism sequence
gaagaaagccctcagaatccat

SEQ ID NO: 4536 - DNA, 22 bp, unidentified
  misc_feature 1..22: note = Description of Unknown:MG29-1-TIGIT-target site-H2 sequence
  misc_feature 1..22: note = Category: DNA sequence of TIGIT target site
  source 1..22: mol_type = genomic DNA; note = uncultivated organism sequence
ctcctgaggtcaccttccacag

SEQ ID NO: 4537 - DNA, 22 bp, unidentified
  misc_feature 1..22: note = Description of Unknown:MG29-1-TIGIT-target site-A3 sequence
  misc_feature 1..22: note = Category: DNA sequence of TIGIT target site
  source 1..22: mol_type = genomic DNA; note = uncultivated organism sequence
tcctgaggtcaccttccacaga

SEQ ID NO: 4538 - RNA, 42 nt, synthetic construct
  misc_feature 1..42: note = Category: MG29-1 sgRNA targeting AAVS1
  misc_feature 1..42: note = Description: MG29-1-AAVS1-sgRNA-A1
  source 1..42: mol_type = other RNA
taatttctactgttgtagatgtttttccaaactgcttctcct

SEQ ID NO: 4539 - RNA, 42 nt, synthetic construct
  misc_feature 1..42: note = Category: MG29-1 sgRNA targeting AAVS1
  misc_feature 1..42: note = Description: MG29-1-AAVS1-sgRNA-B1
  source 1..42: mol_type = other RNA
taatttctactgttgtagattttttccaaactgcttctcctc

SEQ ID NO: 4540 - RNA, 42 nt, synthetic construct
  misc_feature 1..42: note = Category: MG29-1 sgRNA targeting AAVS1
  misc_feature 1..42: note = Description: MG29-1-AAVS1-sgRNA-C1
  source 1..42: mol_type = other RNA
taatttctactgttgtagattccaaactgcttctcctcttgg

SEQ ID NO: 4541 - RNA, 42 nt, synthetic construct
  misc_feature 1..42: note = Category: MG29-1 sgRNA targeting AAVS1
  misc_feature 1..42: note = Description: MG29-1-AAVS1-sgRNA-D1
  source 1..42: mol_type = other RNA
taatttctactgttgtagatccaaactgcttctcctcttggg

SEQ ID NO: 4542 - RNA, 42 nt, synthetic construct
  misc_feature 1..42: note = Category: MG29-1 sgRNA targeting AAVS1
  misc_feature 1..42: note = Description: MG29-1-AAVS1-sgRNA-E1
  source 1..42: mol_type = other RNA
taatttctactgttgtagatcaaactgcttctcctcttggga

SEQ ID NO: 4543 - RNA, 42 nt, synthetic construct
  misc_feature 1..42: note = Category: MG29-1 sgRNA targeting AAVS1
  misc_feature 1..42: note = Description: MG29-1-AAVS1-sgRNA-F1
  source 1..42: mol_type = other RNA
taatttctactgttgtagatctgtcaccaatcctgtccctag

SEQ ID NO: 4544 - RNA, 42 nt, synthetic construct
  misc_feature 1..42: note = Category: MG29-1 sgRNA targeting AAVS1
  misc_feature 1..42: note = Description: MG29-1-AAVS1-sgRNA-G1
  source 1..42: mol_type = other RNA
taatttctactgttgtagattgtcaccaatcctgtccctagt

SEQ ID NO: 4545 - RNA, 42 nt, synthetic construct
  misc_feature 1..42: note = Category: MG29-1 sgRNA targeting AAVS1
  misc_feature 1..42: note = Description: MG29-1-AAVS1-sgRNA-H1
  source 1..42: mol_type = other RNA
taatttctactgttgtagatgggttgtccagaaaaacggtga

SEQ ID NO: 4546 - RNA, 42 nt, synthetic construct
  misc_feature 1..42: note = Category: MG29-1 sgRNA targeting AAVS1
  misc_feature 1..42: note = Description: MG29-1-AAVS1-sgRNA-A2
  source 1..42: mol_type = other RNA
taatttctactgttgtagatccttctccttctggggcctgtg

SEQ ID NO: 4547 - RNA, 42 nt, synthetic construct
  misc_feature 1..42: note = Category: MG29-1 sgRNA targeting AAVS1
  misc_feature 1..42: note = Description: MG29-1-AAVS1-sgRNA-B2
  source 1..42: mol_type = other RNA
taatttctactgttgtagatcttctccttctggggcctgtgc

SEQ ID NO: 4548 - RNA, 42 nt, synthetic construct
  misc_feature 1..42: note = Category: MG29-1 sgRNA targeting AAVS1
  misc_feature 1..42: note = Description: MG29-1-AAVS1-sgRNA-C2
  source 1..42: mol_type = other RNA
taatttctactgttgtagatttaggatggccttctccgacgg

SEQ ID NO: 4549 - RNA, 42 nt, synthetic construct
  misc_feature 1..42: note = Category: MG29-1 sgRNA targeting AAVS1
  misc_feature 1..42: note = Description: MG29-1-AAVS1-sgRNA-D2
  source 1..42: mol_type = other RNA
taatttctactgttgtagattctggacaaccccaaagtaccc

SEQ ID NO: 4550 - RNA, 42 nt, synthetic construct
  misc_feature 1..42: note = Category: MG29-1 sgRNA targeting AAVS1
  misc_feature 1..42: note = Description: MG29-1-AAVS1-sgRNA-E2
  source 1..42: mol_type = other RNA
taatttctactgttgtagatctggacaaccccaaagtacccc

SEQ ID NO: 4551 - RNA, 42 nt, synthetic construct
  misc_feature 1..42: note = Category: MG29-1 sgRNA targeting AAVS1
  misc_feature 1..42: note = Description: MG29-1-AAVS1-sgRNA-F2
  source 1..42: mol_type = other RNA
taatttctactgttgtagattggacaaccccaaagtaccccg

SEQ ID NO: 4552 - RNA, 42 nt, synthetic construct
  misc_feature 1..42: note = Category: MG29-1 sgRNA targeting AAVS1
  misc_feature 1..42: note = Description: MG29-1-AAVS1-sgRNA-G2
  source 1..42: mol_type = other RNA
taatttctactgttgtagatgccacctctccatcctcttgct

SEQ ID NO: 4553 - RNA, 42 nt, synthetic construct
  misc_feature 1..42: note = Category: MG29-1 sgRNA targeting AAVS1
  misc_feature 1..42: note = Description: MG29-1-AAVS1-sgRNA-H2
  source 1..42: mol_type = other RNA
taatttctactgttgtagattttgcctggacaccccgttctc

SEQ ID NO: 4554 - RNA, 42 nt, synthetic construct
  misc_feature 1..42: note = Category: MG29-1 sgRNA targeting AAVS1
  misc_feature 1..42: note = Description: MG29-1-AAVS1-sgRNA-A3
  source 1..42: mol_type = other RNA
taatttctactgttgtagatcctggacaccccgttctcctgt

SEQ ID NO: 4555 - RNA, 42 nt, synthetic construct
  misc_feature 1..42: note = Category: MG29-1 sgRNA targeting AAVS1
  misc_feature 1..42: note = Description: MG29-1-AAVS1-sgRNA-B3
  source 1..42: mol_type = other RNA
taatttctactgttgtagatatttgggcagctcccctacccc

SEQ ID NO: 4556 - RNA, 42 nt, synthetic construct
  misc_feature 1..42: note = Category: MG29-1 sgRNA targeting AAVS1
  misc_feature 1..42: note = Description: MG29-1-AAVS1-sgRNA-C3
  source 1..42: mol_type = other RNA
taatttctactgttgtagatggcagctcccctacccccctta

SEQ ID NO: 4557 - RNA, 42 nt, synthetic construct
  misc_feature 1..42: note = Category: MG29-1 sgRNA targeting AAVS1
  misc_feature 1..42: note = Description: MG29-1-AAVS1-sgRNA-D3
  source 1..42: mol_type = other RNA
taatttctactgttgtagatctgcctccagggatcctgtgtc

SEQ ID NO: 4558 - RNA, 42 nt, synthetic construct
  misc_feature 1..42: note = Category: MG29-1 sgRNA targeting AAVS1
  misc_feature 1..42: note = Description: MG29-1-AAVS1-sgRNA-E3
  source 1..42: mol_type = other RNA
taatttctactgttgtagatatctgtcccctccaccccacag

SEQ ID NO: 4559 - RNA, 42 nt, synthetic construct
  misc_feature 1..42: note = Category: MG29-1 sgRNA targeting AAVS1
  misc_feature 1..42: note = Description: MG29-1-AAVS1-sgRNA-F3
  source 1..42: mol_type = other RNA
taatttctactgttgtagattctgtcccctccaccccacagt

SEQ ID NO: 4560 - RNA, 42 nt, synthetic construct
  misc_feature 1..42: note = Category: MG29-1 sgRNA targeting AAVS1
  misc_feature 1..42: note = Description: MG29-1-AAVS1-sgRNA-G3
  source 1..42: mol_type = other RNA
taatttctactgttgtagatctggagccatctctctccttgc

SEQ ID NO: 4561 - RNA, 42 nt, synthetic construct
  misc_feature 1..42: note = Category: MG29-1 sgRNA targeting AAVS1
  misc_feature 1..42: note = Description: MG29-1-AAVS1-sgRNA-H3
  source 1..42: mol_type = other RNA
taatttctactgttgtagatcttacgatggagccagagagga

SEQ ID NO: 4562 - RNA, 42 nt, synthetic construct
  misc_feature 1..42: note = Category: MG29-1 sgRNA targeting AAVS1
  misc_feature 1..42: note = Description: MG29-1-AAVS1-sgRNA-A4
  source 1..42: mol_type = other RNA
taatttctactgttgtagatactgatcctggtgctgcagctt

SEQ ID NO: 4563 - RNA, 42 nt, synthetic construct
  misc_feature 1..42: note = Category: MG29-1 sgRNA targeting AAVS1
  misc_feature 1..42: note = Description: MG29-1-AAVS1-sgRNA-B4
  source 1..42: mol_type = other RNA
taatttctactgttgtagatgaaaaacaaaatcagaataagt

SEQ ID NO: 4564 - RNA, 42 nt, synthetic construct
  misc_feature 1..42: note = Category: MG29-1 sgRNA targeting AAVS1
  misc_feature 1..42: note = Description: MG29-1-AAVS1-sgRNA-C4
  source 1..42: mol_type = other RNA
taatttctactgttgtagatgctcttcacctttctagtcccc

SEQ ID NO: 4565 - RNA, 42 nt, synthetic construct
  misc_feature 1..42: note = Category: MG29-1 sgRNA targeting AAVS1
  misc_feature 1..42: note = Description: MG29-1-AAVS1-sgRNA-D4
  source 1..42: mol_type = other RNA
taatttctactgttgtagattagtccccaatttatattgttc

SEQ ID NO: 4566 - RNA, 42 nt, synthetic construct
  misc_feature 1..42: note = Category: MG29-1 sgRNA targeting AAVS1
  misc_feature 1..42: note = Description: MG29-1-AAVS1-sgRNA-E4
  source 1..42: mol_type = other RNA
taatttctactgttgtagattattgttcctccgtgcgtcagt

SEQ ID NO: 4567 - RNA, 42 nt, synthetic construct
  misc_feature 1..42: note = Category: MG29-1 sgRNA targeting AAVS1
  misc_feature 1..42: note = Description: MG29-1-AAVS1-sgRNA-F4
  source 1..42: mol_type = other RNA
taatttctactgttgtagatacctgtgagataaggccagtag

SEQ ID NO: 4568 - RNA, 42 nt, synthetic construct
  misc_feature 1..42: note = Category: MG29-1 sgRNA targeting AAVS1
  misc_feature 1..42: note = Description: MG29-1-AAVS1-sgRNA-G4
  source 1..42: mol_type = other RNA
taatttctactgttgtagatcctgtgagataaggccagtagc

SEQ ID NO: 4569 - DNA, 22 bp, Homo sapiens
  misc_feature 1..22: note = Description of Unknown:MG29-1-AAVS1-target site-A1 sequence
  misc_feature 1..22: note = Category: DNA sequence of AAVS1 target site
  source 1..22: mol_type = genomic DNA
gtttttccaaactgcttctcct

SEQ ID NO: 4570 - DNA, 22 bp, Homo sapiens
  misc_feature 1..22: note = Description of Unknown:MG29-1-AAVS1-target site-B1 sequence
  misc_feature 1..22: note = Category: DNA sequence of AAVS1 target site
  source 1..22: mol_type = genomic DNA
tttttccaaactgcttctcctc

SEQ ID NO: 4571 - DNA, 22 bp, Homo sapiens
  misc_feature 1..22: note = Description of Unknown:MG29-1-AAVS1-target site-C1 sequence
  misc_feature 1..22: note = Category: DNA sequence of AAVS1 target site
  source 1..22: mol_type = genomic DNA
tccaaactgcttctcctcttgg

SEQ ID NO: 4572 - DNA, 22 bp, Homo sapiens
  misc_feature 1..22: note = Description of Unknown:MG29-1-AAVS1-target site-D1 sequence
  misc_feature 1..22: note = Category: DNA sequence of AAVS1 target site
  source 1..22: mol_type = genomic DNA
ccaaactgcttctcctcttggg

SEQ ID NO: 4573 - DNA, 22 bp, Homo sapiens
  misc_feature 1..22: note = Description of Unknown:MG29-1-AAVS1-target site-E1 sequence
  misc_feature 1..22: note = Category: DNA sequence of AAVS1 target site
  source 1..22: mol_type = genomic DNA
caaactgcttctcctcttggga

SEQ ID NO: 4574 - DNA, 22 bp, Homo sapiens
  misc_feature 1..22: note = Description of Unknown:MG29-1-AAVS1-target site-F1 sequence
  misc_feature 1..22: note = Category: DNA sequence of AAVS1 target site
  source 1..22: mol_type = genomic DNA
ctgtcaccaatcctgtccctag

SEQ ID NO: 4575 - DNA, 22 bp, Homo sapiens
  misc_feature 1..22: note = Description of Unknown:MG29-1-AAVS1-target site-G1 sequence
  misc_feature 1..22: note = Category: DNA sequence of AAVS1 target site
  source 1..22: mol_type = genomic DNA
tgtcaccaatcctgtccctagt

SEQ ID NO: 4576 - DNA, 22 bp, Homo sapiens
  misc_feature 1..22: note = Description of Unknown:MG29-1-AAVS1-target site-H1 sequence
  misc_feature 1..22: note = Category: DNA sequence of AAVS1 target site
  source 1..22: mol_type = genomic DNA
gggttgtccagaaaaacggtga

SEQ ID NO: 4577 - DNA, 22 bp, Homo sapiens
  misc_feature 1..22: note = Description of Unknown:MG29-1-AAVS1-target site-A2 sequence
  misc_feature 1..22: note = Category: DNA sequence of AAVS1 target site
  source 1..22: mol_type = genomic DNA
ccttctccttctggggcctgtg

SEQ ID NO: 4578 - DNA, 22 bp, Homo sapiens
  misc_feature 1..22: note = Description of Unknown:MG29-1-AAVS1-target site-B2 sequence
  misc_feature 1..22: note = Category: DNA sequence of AAVS1 target site
  source 1..22: mol_type = genomic DNA
cttctccttctggggcctgtgc

SEQ ID NO: 4579 - DNA, 22 bp, Homo sapiens
  misc_feature 1..22: note = Description of Unknown:MG29-1-AAVS1-target site-C2 sequence
  misc_feature 1..22: note = Category: DNA sequence of AAVS1 target site
  source 1..22: mol_type = genomic DNA
ttaggatggccttctccgacgg

SEQ ID NO: 4580 - DNA, 22 bp, Homo sapiens
  misc_feature 1..22: note = Description of Unknown:MG29-1-AAVS1-target site-D2 sequence
  misc_feature 1..22: note = Category: DNA sequence of AAVS1 target site
  source 1..22: mol_type = genomic DNA
tctggacaaccccaaagtaccc

SEQ ID NO: 4581 - DNA, 22 bp, Homo sapiens
  misc_feature 1..22: note = Description of Unknown:MG29-1-AAVS1-target site-E2 sequence
  misc_feature 1..22: note = Category: DNA sequence of AAVS1 target site
  source 1..22: mol_type = genomic DNA
ctggacaaccccaaagtacccc

SEQ ID NO: 4582 - DNA, 22 bp, Homo sapiens
  misc_feature 1..22: note = Description of Unknown:MG29-1-AAVS1-target site-F2 sequence
  misc_feature 1..22: note = Category: DNA sequence of AAVS1 target site
  source 1..22: mol_type = genomic DNA
tggacaaccccaaagtaccccg

SEQ ID NO: 4583 - DNA, 22 bp, Homo sapiens
  misc_feature 1..22: note = Description of Unknown:MG29-1-AAVS1-target site-G2 sequence
  misc_feature 1..22: note = Category: DNA sequence of AAVS1 target site
  source 1..22: mol_type = genomic DNA
gccacctctccatcctcttgct

SEQ ID NO: 4584 - DNA, 22 bp, Homo sapiens
  misc_feature 1..22: note = Description of Unknown:MG29-1-AAVS1-target site-H2 sequence
  misc_feature 1..22: note = Category: DNA sequence of AAVS1 target site
  source 1..22: mol_type = genomic DNA
tttgcctggacaccccgttctc

SEQ ID NO: 4585 - DNA, 22 bp, Homo sapiens
  misc_feature 1..22: note = Description of Unknown:MG29-1-AAVS1-target site-A3 sequence
  misc_feature 1..22: note = Category: DNA sequence of AAVS1 target site
  source 1..22: mol_type = genomic DNA
cctggacaccccgttctcctgt

SEQ ID NO: 4586 - DNA, 22 bp, Homo sapiens
  misc_feature 1..22: note = Description of Unknown:MG29-1-AAVS1-target site-B3 sequence
  misc_feature 1..22: note = Category: DNA sequence of AAVS1 target site
  source 1..22: mol_type = genomic DNA
atttgggcagctcccctacccc

SEQ ID NO: 4587 - DNA, 22 bp, Homo sapiens
  misc_feature 1..22: note = Description of Unknown:MG29-1-AAVS1-target site-C3 sequence
  misc_feature 1..22: note = Category: DNA sequence of AAVS1 target site
  source 1..22: mol_type = genomic DNA
ggcagctcccctacccccctta

SEQ ID NO: 4588 - DNA, 22 bp, Homo sapiens
  misc_feature 1..22: note = Description of Unknown:MG29-1-AAVS1-target site-D3 sequence
  misc_feature 1..22: note = Category: DNA sequence of AAVS1 target site
  source 1..22: mol_type = genomic DNA
ctgcctccagggatcctgtgtc

SEQ ID NO: 4589 - DNA, 22 bp, Homo sapiens
  misc_feature 1..22: note = Description of Unknown:MG29-1-AAVS1-target site-E3 sequence
  misc_feature 1..22: note = Category: DNA sequence of AAVS1 target site
  source 1..22: mol_type = genomic DNA
atctgtcccctccaccccacag

SEQ ID NO: 4590 - DNA, 22 bp, Homo sapiens
  misc_feature 1..22: note = Description of Unknown:MG29-1-AAVS1-target site-F3 sequence
  misc_feature 1..22: note = Category: DNA sequence of AAVS1 target site
  source 1..22: mol_type = genomic DNA
tctgtcccctccaccccacagt

SEQ ID NO: 4591 - DNA, 22 bp, Homo sapiens
  misc_feature 1..22: note = Description of Unknown:MG29-1-AAVS1-target site-G3 sequence
  misc_feature 1..22: note = Category: DNA sequence of AAVS1 target site
  source 1..22: mol_type = genomic DNA
ctggagccatctctctccttgc

SEQ ID NO: 4592 - DNA, 22 bp, Homo sapiens
  misc_feature 1..22: note = Description of Unknown:MG29-1-AAVS1-target site-H3 sequence
  misc_feature 1..22: note = Category: DNA sequence of AAVS1 target site
  source 1..22: mol_type = genomic DNA
cttacgatggagccagagagga

SEQ ID NO: 4593 - DNA, 22 bp, Homo sapiens
  misc_feature 1..22: note = Description of Unknown:MG29-1-AAVS1-target site-A4 sequence
  misc_feature 1..22: note = Category: DNA sequence of AAVS1 target site
  source 1..22: mol_type = genomic DNA
actgatcctggtgctgcagctt

SEQ ID NO: 4594 - DNA, 22 bp, Homo sapiens
  misc_feature 1..22: note = Description of Unknown:MG29-1-AAVS1-target site-B4 sequence
  misc_feature 1..22: note = Category: DNA sequence of AAVS1 target site
  source 1..22: mol_type = genomic DNA
gaaaaacaaaatcagaataagt

SEQ ID NO: 4595 - DNA, 22 bp, Homo sapiens
  misc_feature 1..22: note = Description of Unknown:MG29-1-AAVS1-target site-C4 sequence
  misc_feature 1..22: note = Category: DNA sequence of AAVS1 target site
  source 1..22: mol_type = genomic DNA
gctcttcacctttctagtcccc

SEQ ID NO: 4596 - DNA, 22 bp, Homo sapiens
  misc_feature 1..22: note = Description of Unknown:MG29-1-AAVS1-target site-D4 sequence
  misc_feature 1..22: note = Category: DNA sequence of AAVS1 target site
  source 1..22: mol_type = genomic DNA
tagtccccaatttatattgttc

SEQ ID NO: 4597 - DNA, 22 bp, Homo sapiens
  misc_feature 1..22: note = Description of Unknown:MG29-1-AAVS1-target site-E4 sequence
  misc_feature 1..22: note = Category: DNA sequence of AAVS1 target site
  source 1..22: mol_type = genomic DNA
tattgttcctccgtgcgtcagt

SEQ ID NO: 4598 - DNA, 22 bp, Homo sapiens
  misc_feature 1..22: note = Description of Unknown:MG29-1-AAVS1-target site-F4 sequence
  misc_feature 1..22: note = Category: DNA sequence of AAVS1 target site
  source 1..22: mol_type = genomic DNA
acctgtgagataaggccagtag

SEQ ID NO: 4599 - DNA, 22 bp, Homo sapiens
  misc_feature 1..22: note = Description of Unknown:MG29-1-AAVS1-target site-G4 sequence
  misc_feature 1..22: note = Category: DNA sequence of AAVS1 target site
  source 1..22: mol_type = genomic DNA
cctgtgagataaggccagtagc

SEQ ID NO: 4600 - RNA, 42 nt, synthetic construct
  misc_feature 1..42: note = Category: MG29-1 sgRNA targeting B2M
  misc_feature 1..42: note = Description: MG29-1-B2M-sgRNA-A1
  source 1..42: mol_type = other RNA
taatttctactgttgtagattggcctggaggctatccagcgt

SEQ ID NO: 4601 - RNA, 42 nt, synthetic construct
  misc_feature 1..42: note = Category: MG29-1 sgRNA targeting B2M
  misc_feature 1..42: note = Description: MG29-1-B2M-sgRNA-B1
  source 1..42: mol_type = other RNA
taatttctactgttgtagatcccgatattcctcaggtactcc

SEQ ID NO: 4602 - RNA, 42 nt, synthetic construct
  misc_feature 1..42: note = Category: MG29-1 sgRNA targeting B2M
  misc_feature 1..42: note = Description: MG29-1-B2M-sgRNA-C1
  source 1..42: mol_type = other RNA
taatttctactgttgtagatccgatattcctcaggtactcca

SEQ ID NO: 4603 - RNA, 42 nt, synthetic construct
  misc_feature 1..42: note = Category: MG29-1 sgRNA targeting B2M
  misc_feature 1..42: note = Description: MG29-1-B2M-sgRNA-D1
  source 1..42: mol_type = other RNA
taatttctactgttgtagatctcacgtcatccagcagagaat

SEQ ID NO: 4604 - RNA, 42 nt, synthetic construct
  misc_feature 1..42: note = Category: MG29-1 sgRNA targeting B2M
  misc_feature 1..42: note = Description: MG29-1-B2M-sgRNA-E1
  source 1..42: mol_type = other RNA
taatttctactgttgtagatctgaattgctatgtgtctgggt

SEQ ID NO: 4605 - RNA, 42 nt, synthetic construct
  misc_feature 1..42: note = Category: MG29-1 sgRNA targeting B2M
  misc_feature 1..42: note = Description: MG29-1-B2M-sgRNA-F1
  source 1..42: mol_type = other RNA
taatttctactgttgtagatatccatccgacattgaagttga

SEQ ID NO: 4606 - RNA, 42 nt, synthetic construct
  misc_feature 1..42: note = Category: MG29-1 sgRNA targeting B2M
  misc_feature 1..42: note = Description: MG29-1-B2M-sgRNA-G1
  source 1..42: mol_type = other RNA
taatttctactgttgtagatagcaaggactggtctttctatc

SEQ ID NO: 4607 - RNA, 42 nt, synthetic construct
  misc_feature 1..42: note = Category: MG29-1 sgRNA targeting B2M
  misc_feature 1..42: note = Description: MG29-1-B2M-sgRNA-H1
  source 1..42: mol_type = other RNA
taatttctactgttgtagattatctcttgtactacactgaat

SEQ ID NO: 4608 - RNA, 42 nt, synthetic construct
  misc_feature 1..42: note = Category: MG29-1 sgRNA targeting B2M
  misc_feature 1..42: note = Description: MG29-1-B2M-sgRNA-A2
  source 1..42: mol_type = other RNA
taatttctactgttgtagattcacagcccaagatagttaagt

SEQ ID NO: 4609 - RNA, 42 nt, synthetic construct
  misc_feature 1..42: note = Category: MG29-1 sgRNA targeting B2M
  misc_feature 1..42: note = Description: MG29-1-B2M-sgRNA-B2
  source 1..42: mol_type = other RNA
taatttctactgttgtagattcagtgggggtgaattcagtgt

SEQ ID NO: 4610 - RNA, 42 nt, synthetic construct
  misc_feature 1..42: note = Category: MG29-1 sgRNA targeting B2M
  misc_feature 1..42: note = Description: MG29-1-B2M-sgRNA-C2
  source 1..42: mol_type = other RNA
taatttctactgttgtagatcagtgggggtgaattcagtgta

SEQ ID NO: 4611 - RNA, 42 nt, synthetic construct
  misc_feature 1..42: note = Category: MG29-1 sgRNA targeting B2M
  misc_feature 1..42: note = Description: MG29-1-B2M-sgRNA-D2
  source 1..42: mol_type = other RNA
taatttctactgttgtagatagtgggggtgaattcagtgtag

SEQ ID NO: 4612 - RNA, 42 nt, synthetic construct
  misc_feature 1..42: note = Category: MG29-1 sgRNA targeting B2M
  misc_feature 1..42: note = Description: MG29-1-B2M-sgRNA-E2
  source 1..42: mol_type = other RNA
taatttctactgttgtagattcaattctctctccattcttca

SEQ ID NO: 4613 - RNA, 42 nt, synthetic construct
  misc_feature 1..42: note = Category: MG29-1 sgRNA targeting B2M
  misc_feature 1..42: note = Description: MG29-1-B2M-sgRNA-F2
  source 1..42: mol_type = other RNA
taatttctactgttgtagatcaattctctctccattcttcag

SEQ ID NO: 4614 - RNA, 42 nt, synthetic construct
  misc_feature 1..42: note = Category: MG29-1 sgRNA targeting B2M
  misc_feature 1..42: note = Description: MG29-1-B2M-sgRNA-G2
  source 1..42: mol_type = other RNA
taatttctactgttgtagataattctctctccattcttcagt

SEQ ID NO: 4615 - RNA, 42 nt, synthetic construct
  misc_feature 1..42: note = Category: MG29-1 sgRNA targeting B2M
  misc_feature 1..42: note = Description: MG29-1-B2M-sgRNA-H2
  source 1..42: mol_type = other RNA
taatttctactgttgtagatactttccattctctgctggatg

SEQ ID NO: 4616 - RNA, 42 nt, synthetic construct
  misc_feature 1..42: note = Category: MG29-1 sgRNA targeting B2M
  misc_feature 1..42: note = Description: MG29-1-B2M-sgRNA-A3
  source 1..42: mol_type = other RNA
taatttctactgttgtagatcattctctgctggatgacgtga

SEQ ID NO: 4617 - RNA, 42 nt, synthetic construct
  misc_feature 1..42: note = Category: MG29-1 sgRNA targeting B2M
  misc_feature 1..42: note = Description: MG29-1-B2M-sgRNA-B3
  source 1..42: mol_type = other RNA
taatttctactgttgtagattctccactgtctttttcataga

SEQ ID NO: 4618 - RNA, 42 nt, synthetic construct
  misc_feature 1..42: note = Category: MG29-1 sgRNA targeting B2M
  misc_feature 1..42: note = Description: MG29-1-B2M-sgRNA-C3
  source 1..42: mol_type = other RNA
taatttctactgttgtagatctccactgtctttttcatagat

SEQ ID NO: 4619 - RNA, 42 nt, synthetic construct
  misc_feature 1..42: note = Category: MG29-1 sgRNA targeting B2M
  misc_feature 1..42: note = Description: MG29-1-B2M-sgRNA-D3
  source 1..42: mol_type = other RNA
taatttctactgttgtagattccactgtctttttcatagatc

SEQ ID NO: 4620 - RNA, 42 nt, synthetic construct
  misc_feature 1..42: note = Category: MG29-1 sgRNA targeting B2M
  misc_feature 1..42: note = Description: MG29-1-B2M-sgRNA-E3
  source 1..42: mol_type = other RNA
taatttctactgttgtagattcatagatcgagacatgtaagc

SEQ ID NO: 4621 - RNA, 42 nt, synthetic construct
  misc_feature 1..42: note = Category: MG29-1 sgRNA targeting B2M
  misc_feature 1..42: note = Description: MG29-1-B2M-sgRNA-F3
  source 1..42: mol_type = other RNA
taatttctactgttgtagatcatagatcgagacatgtaagca

SEQ ID NO: 4622 - RNA, 42 nt, synthetic construct; identical to SEQ ID NO: 4600
  misc_feature 1..42: note = Category: MG29-1 sgRNA targeting B2M
  misc_feature 1..42: note = Description: MG29-1-B2M-sgRNA-G3
  source 1..42: mol_type = other RNA

SEQ ID NO: 4623 - RNA, 42 nt, synthetic construct
  misc_feature 1..42: note = Category: MG29-1 sgRNA targeting B2M
  misc_feature 1..42: note = Description: MG29-1-B2M-sgRNA-H3
  source 1..42: mol_type = other RNA
taatttctactgttgtagatggcggggagcaggggagacctt

SEQ ID NO: 4624 - RNA, 42 nt, synthetic construct
  misc_feature 1..42: note = Category: MG29-1 sgRNA targeting B2M
  misc_feature 1..42: note = Description: MG29-1-B2M-sgRNA-A4
  source 1..42: mol_type = other RNA
taatttctactgttgtagatgcctacggcgacgggagggtcg

SEQ ID NO: 4625 - RNA, 42 nt, synthetic construct
  misc_feature 1..42: note = Category: MG29-1 sgRNA targeting B2M
  misc_feature 1..42: note = Description: MG29-1-B2M-sgRNA-B4
  source 1..42: mol_type = other RNA
taatttctactgttgtagatgggcgtcgataagcgtcagagc

SEQ ID NO: 4626 - RNA, 42 nt, synthetic construct
  misc_feature 1..42: note = Category: MG29-1 sgRNA targeting B2M
  misc_feature 1..42: note = Description: MG29-1-B2M-sgRNA-C4
  source 1..42: mol_type = other RNA
taatttctactgttgtagattcttccgctctttcgcggggcc

SEQ ID NO: 4627 - RNA, 42 nt, synthetic construct
  misc_feature 1..42: note = Category: MG29-1 sgRNA targeting B2M
  misc_feature 1..42: note = Description: MG29-1-B2M-sgRNA-D4
  source 1..42: mol_type = other RNA
taatttctactgttgtagatgcggggcctctggctcccccag

SEQ ID NO: 4628 - RNA, 42 nt, synthetic construct
  misc_feature 1..42: note = Category: MG29-1 sgRNA targeting B2M
  misc_feature 1..42: note = Description: MG29-1-B2M-sgRNA-E4
  source 1..42: mol_type = other RNA
taatttctactgttgtagattgaacgcgtggaggggcgcttg

SEQ ID NO: 4629 - RNA, 42 nt, synthetic construct
  misc_feature 1..42: note = Category: MG29-1 sgRNA targeting B2M
  misc_feature 1..42: note = Description: MG29-1-B2M-sgRNA-F4
  source 1..42: mol_type = other RNA
taatttctactgttgtagatctccccacggtgtggccccaca

SEQ ID NO: 4630 - RNA, 42 nt, synthetic construct
  misc_feature 1..42: note = Category: MG29-1 sgRNA targeting B2M
  misc_feature 1..42: note = Description: MG29-1-B2M-sgRNA-G4
  source 1..42: mol_type = other RNA
taatttctactgttgtagatggacgagcctacccgtccccca

SEQ ID NO: 4631 - RNA, 42 nt, synthetic construct
  misc_feature 1..42: note = Category: MG29-1 sgRNA targeting B2M
  misc_feature 1..42: note = Description: MG29-1-B2M-sgRNA-H4
  source 1..42: mol_type = other RNA
taatttctactgttgtagattcccgaccctcccgtcgccgta

SEQ ID NO: 4632 - RNA, 42 nt, synthetic construct
  misc_feature 1..42: note = Category: MG29-1 sgRNA targeting B2M
  misc_feature 1..42: note = Description: MG29-1-B2M-sgRNA-A5
  source 1..42: mol_type = other RNA
taatttctactgttgtagatgcgggagcgcatgccttttggc

SEQ ID NO: 4633 - RNA, 42 nt, synthetic construct
  misc_feature 1..42: note = Category: MG29-1 sgRNA targeting B2M
  misc_feature 1..42: note = Description: MG29-1-B2M-sgRNA-B5
  source 1..42: mol_type = other RNA
taatttctactgttgtagatcgggagcgcatgccttttggct

SEQ ID NO: 4634 - RNA, 42 nt, synthetic construct
  misc_feature 1..42: note = Category: MG29-1 sgRNA targeting B2M
  misc_feature 1..42: note = Description: MG29-1-B2M-sgRNA-C5
  source 1..42: mol_type = other RNA
taatttctactgttgtagatggctgtaattcgtgcatttttt

SEQ ID NO: 4635 - RNA, 42 nt, synthetic construct
  misc_feature 1..42: note = Category: MG29-1 sgRNA targeting B2M
  misc_feature 1..42: note = Description: MG29-1-B2M-sgRNA-D5
  source 1..42: mol_type = other RNA
taatttctactgttgtagatgctgtaattcgtgcattttttt

SEQ ID NO: 4636 - RNA, 42 nt, synthetic construct
  misc_feature 1..42: note = Category: MG29-1 sgRNA targeting B2M
  misc_feature 1..42: note = Description: MG29-1-B2M-sgRNA-E5
  source 1..42: mol_type = other RNA
taatttctactgttgtagattttttaagaaaaacgcctgcct

SEQ ID NO: 4637 - RNA, 42 nt, synthetic construct
  misc_feature 1..42: note = Category: MG29-1 sgRNA targeting B2M
  misc_feature 1..42: note = Description: MG29-1-B2M-sgRNA-F5
  source 1..42: mol_type = other RNA
taatttctactgttgtagatttttaagaaaaacgcctgcctt

SEQ ID NO: 4638 - RNA, 42 nt, synthetic construct
  misc_feature 1..42: note = Category: MG29-1 sgRNA targeting B2M
  misc_feature 1..42: note = Description: MG29-1-B2M-sgRNA-G5
  source 1..42: mol_type = other RNA
taatttctactgttgtagattttaagaaaaacgcctgccttc

SEQ ID NO: 4639 - RNA, 42 nt, synthetic construct
  misc_feature 1..42: note = Category: MG29-1 sgRNA targeting B2M
  misc_feature 1..42: note = Description: MG29-1-B2M-sgRNA-H5
  source 1..42: mol_type = other RNA
taatttctactgttgtagatttaagaaaaacgcctgccttct

SEQ ID NO: 4640 - RNA, 42 nt, synthetic construct
  misc_feature 1..42: note = Category: MG29-1 sgRNA targeting B2M
  misc_feature 1..42: note = Description: MG29-1-B2M-sgRNA-A6
  source 1..42: mol_type = other RNA
taatttctactgttgtagattaagaaaaacgcctgccttctg

SEQ ID NO: 4641 - RNA, 42 nt, synthetic construct
  misc_feature 1..42: note = Category: MG29-1 sgRNA targeting B2M
  misc_feature 1..42: note = Description: MG29-1-B2M-sgRNA-B6
  source 1..42: mol_type = other RNA
taatttctactgttgtagataagaaaaacgcctgccttctgc

SEQ ID NO: 4642 - RNA, 42 nt, synthetic construct
  misc_feature 1..42: note = Category: MG29-1 sgRNA targeting B2M
  misc_feature 1..42: note = Description: MG29-1-B2M-sgRNA-C6
  source 1..42: mol_type = other RNA
taatttctactgttgtagatagaaaaacgcctgccttctgcg

SEQ ID NO: 4643 - RNA, 42 nt, synthetic construct
  misc_feature 1..42: note = Category: MG29-1 sgRNA targeting B2M
  misc_feature 1..42: note = Description: MG29-1-B2M-sgRNA-D6
  source 1..42: mol_type = other RNA
taatttctactgttgtagatcgtacagagggcttcctctttg

SEQ ID NO: 4644 - RNA, 42 nt, synthetic construct
  misc_feature 1..42: note = Category: MG29-1 sgRNA targeting B2M
  misc_feature 1..42: note = Description: MG29-1-B2M-sgRNA-E6
  source 1..42: mol_type = other RNA
taatttctactgttgtagatgtacagagggcttcctctttgg

SEQ ID NO: 4645 - RNA, 42 nt, synthetic construct
  misc_feature 1..42: note = Category: MG29-1 sgRNA targeting B2M
  misc_feature 1..42: note = Description: MG29-1-B2M-sgRNA-F6
  source 1..42: mol_type = other RNA
taatttctactgttgtagatgctctttgcctggttgtttcca

SEQ ID NO: 4646 - RNA, 42 nt, synthetic construct
  misc_feature 1..42: note = Category: MG29-1 sgRNA targeting B2M
  misc_feature 1..42: note = Description: MG29-1-B2M-sgRNA-G6
  source 1..42: mol_type = other RNA
taatttctactgttgtagatcctggttgtttccaagatgtac

SEQ ID NO: 4647 - RNA, 42 nt, synthetic construct
  misc_feature 1..42: note = Category: MG29-1 sgRNA targeting B2M
  misc_feature 1..42: note = Description: MG29-1-B2M-sgRNA-H6
  source 1..42: mol_type = other RNA
taatttctactgttgtagatcaagatgtactgtgcctcttac

SEQ ID NO: 4648 - RNA, 42 nt, synthetic construct
  misc_feature 1..42: note = Category: MG29-1 sgRNA targeting B2M
  misc_feature 1..42: note = Description: MG29-1-B2M-sgRNA-A7
  source 1..42: mol_type = other RNA
taatttctactgttgtagatcaaaaccgaaagtaagaggcac

SEQ ID NO: 4649 - RNA, 42 nt, synthetic construct
  misc_feature 1..42: note = Category: MG29-1 sgRNA targeting B2M
  misc_feature 1..42: note = Description: MG29-1-B2M-sgRNA-B7
  source 1..42: mol_type = other RNA
taatttctactgttgtagataaaaccgaaagtaagaggcaca

SEQ ID NO: 4650 - RNA, 42 nt, synthetic construct
  misc_feature 1..42: note = Category: MG29-1 sgRNA targeting B2M
  misc_feature 1..42: note = Description: MG29-1-B2M-sgRNA-C7
  source 1..42: mol_type = other RNA
taatttctactgttgtagatctctggagaatctcacgcagaa

SEQ ID NO: 4651 - RNA, 42 nt, synthetic construct
  misc_feature 1..42: note = Category: MG29-1 sgRNA targeting B2M
  misc_feature 1..42: note = Description: MG29-1-B2M-sgRNA-D7
  source 1..42: mol_type = other RNA
taatttctactgttgtagattcttaaaaaaaaatgcacgaat

SEQ ID NO: 4652 - RNA, 42 nt, synthetic construct
  misc_feature 1..42: note = Category: MG29-1 sgRNA targeting B2M
  misc_feature 1..42: note = Description: MG29-1-B2M-sgRNA-E7
  source 1..42: mol_type = other RNA
taatttctactgttgtagatcttaaaaaaaaatgcacgaatt

SEQ ID NO: 4653 - RNA, 42 nt, synthetic construct
  misc_feature 1..42: note = Category: MG29-1 sgRNA targeting B2M
  misc_feature 1..42: note = Description: MG29-1-B2M-sgRNA-F7
  source 1..42: mol_type = other RNA
taatttctactgttgtagatttaaaaaaaaatgcacgaatta

SEQ ID NO: 4654 - RNA, 42 nt, synthetic construct
  misc_feature 1..42: note = Category: MG29-1 sgRNA targeting B2M
  misc_feature 1..42: note = Description: MG29-1-B2M-sgRNA-G7
  source 1..42: mol_type = other RNA
taatttctactgttgtagatttcttcaaaatggaggtggctt

SEQ ID NO: 4655 - RNA, 42 nt, synthetic construct
  misc_feature 1..42: note = Category: MG29-1 sgRNA targeting B2M
  misc_feature 1..42: note = Description: MG29-1-B2M-sgRNA-H7
  source 1..42: mol_type = other RNA
taatttctactgttgtagatgccagagtggaaatggaattgg

SEQ ID NO: 4656 - RNA, 42 nt, synthetic construct
  misc_feature 1..42: note = Category: MG29-1 sgRNA targeting B2M
  misc_feature 1..42: note = Description: MG29-1-B2M-sgRNA-A8
  source 1..42: mol_type = other RNA
taatttctactgttgtagatgagtacctgaggaatatcggga

SEQ ID NO: 4657 - RNA, 42 nt, synthetic construct
  misc_feature 1..42: note = Category: MG29-1 sgRNA targeting B2M
  misc_feature 1..42: note = Description: MG29-1-B2M-sgRNA-B8
  source 1..42: mol_type = other RNA
taatttctactgttgtagatacttggggctaacttggtgtca

SEQ ID NO: 4658 - RNA, 42 nt, synthetic construct
  misc_feature 1..42: note = Category: MG29-1 sgRNA targeting B2M
  misc_feature 1..42: note = Description: MG29-1-B2M-sgRNA-C8
  source 1..42: mol_type = other RNA
taatttctactgttgtagatcatttggtcatcgatttctccc

SEQ ID NO: 4659 - RNA, 42 nt, synthetic construct
  misc_feature 1..42: note = Category: MG29-1 sgRNA targeting B2M
  misc_feature 1..42: note = Description: MG29-1-B2M-sgRNA-D8
  source 1..42: mol_type = other RNA
taatttctactgttgtagatgtcatcgatttctcccaattcc

SEQ ID NO: 4660 - RNA, 42 nt, synthetic construct
  misc_feature 1..42: note = Category: MG29-1 sgRNA targeting B2M
  misc_feature 1..42: note = Description: MG29-1-B2M-sgRNA-E8
  source 1..42: mol_type = other RNA
taatttctactgttgtagattcccaattccatttccactctg

SEQ ID NO: 4661 - RNA, 42 nt, synthetic construct
  misc_feature 1..42: note = Category: MG29-1 sgRNA targeting B2M
  misc_feature 1..42: note = Description: MG29-1-B2M-sgRNA-F8
  source 1..42: mol_type = other RNA
taatttctactgttgtagatcactctggccaaatgagcttcc

SEQ ID NO: 4662 - RNA, 42 nt, synthetic construct
  misc_feature 1..42: note = Category: MG29-1 sgRNA targeting B2M
  misc_feature 1..42: note = Description: MG29-1-B2M-sgRNA-G8
  source 1..42: mol_type = other RNA
taatttctactgttgtagatgaagaataaaccgtgacttggt

SEQ ID NO: 4663 - RNA, 42 nt, synthetic construct
  misc_feature 1..42: note = Category: MG29-1 sgRNA targeting B2M
  misc_feature 1..42: note = Description: MG29-1-B2M-sgRNA-H8
  source 1..42: mol_type = other RNA
taatttctactgttgtagataagaataaaccgtgacttggta

SEQ ID NO: 4664 - RNA, 42 nt, synthetic construct
  misc_feature 1..42: note = Category: MG29-1 sgRNA targeting B2M
  misc_feature 1..42: note = Description: MG29-1-B2M-sgRNA-A9
  source 1..42: mol_type = other RNA
taatttctactgttgtagatcctcataattcctctatacatg

SEQ ID NO: 4665 - RNA, 42 nt, synthetic construct
  misc_feature 1..42: note = Category: MG29-1 sgRNA targeting B2M
  misc_feature 1..42: note = Description: MG29-1-B2M-sgRNA-B9
  source 1..42: mol_type = other RNA
taatttctactgttgtagatttgttttttttctagcagattt

SEQ ID NO: 4666 - RNA, 42 nt, synthetic construct
  misc_feature 1..42: note = Category: MG29-1 sgRNA targeting B2M
  misc_feature 1..42: note = Description: MG29-1-B2M-sgRNA-C9
  source 1..42: mol_type = other RNA
taatttctactgttgtagattgttttttttctagcagatttc

SEQ ID NO: 4667 - RNA, 42 nt, synthetic construct
  misc_feature 1..42: note = Category: MG29-1 sgRNA targeting B2M
  misc_feature 1..42: note = Description: MG29-1-B2M-sgRNA-D9
  source 1..42: mol_type = other RNA
taatttctactgttgtagatgttttttttctagcagatttct

SEQ ID NO: 4668 - RNA, 42 nt, synthetic construct
  misc_feature 1..42: note = Category: MG29-1 sgRNA targeting B2M
  misc_feature 1..42: note = Description: MG29-1-B2M-sgRNA-E9
  source 1..42: mol_type = other RNA
taatttctactgttgtagatttttttttctagcagatttcta

SEQ ID NO: 4669 - RNA, 42 nt, synthetic construct
  misc_feature 1..42: note = Category: MG29-1 sgRNA targeting B2M
  misc_feature 1..42: note = Description: MG29-1-B2M-sgRNA-F9
  source 1..42: mol_type = other RNA
taatttctactgttgtagatttttctagcagatttctagcag

SEQ ID NO: 4670 - RNA, 42 nt, synthetic construct
  misc_feature 1..42: note = Category: MG29-1 sgRNA targeting B2M
  misc_feature 1..42: note = Description: MG29-1-B2M-sgRNA-G9
  source 1..42: mol_type = other RNA
taatttctactgttgtagattttctagcagatttctagcagt

SEQ ID NO: 4671 - RNA, 42 nt, synthetic construct
  misc_feature 1..42: note = Category: MG29-1 sgRNA targeting B2M
  misc_feature 1..42: note = Description: MG29-1-B2M-sgRNA-H9
  source 1..42: mol_type = other RNA
taatttctactgttgtagatttctagcagatttctagcagta

SEQ ID NO: 4672 - RNA, 42 nt, synthetic construct
  misc_feature 1..42: note = Category: MG29-1 sgRNA targeting B2M
  misc_feature 1..42: note = Description: MG29-1-B2M-sgRNA-A10
  source 1..42: mol_type = other RNA
taatttctactgttgtagattctagcagatttctagcagtat

SEQ ID NO: 4673 - RNA, 42 nt, synthetic construct
  misc_feature 1..42: note = Category: MG29-1 sgRNA targeting B2M
  misc_feature 1..42: note = Description: MG29-1-B2M-sgRNA-B10
  source 1..42: mol_type = other RNA
taatttctactgttgtagatctagcagatttctagcagtatc

SEQ ID NO: 4674 - RNA, 42 nt, synthetic construct
  misc_feature 1..42: note = Category: MG29-1 sgRNA targeting B2M
  misc_feature 1..42: note = Description: MG29-1-B2M-sgRNA-C10
  source 1..42: mol_type = other RNA
taatttctactgttgtagattagcagatttctagcagtatct

SEQ ID NO: 4675 - RNA, 42 nt, synthetic construct
  misc_feature 1..42: note = Category: MG29-1 sgRNA targeting B2M
  misc_feature 1..42: note = Description: MG29-1-B2M-sgRNA-D10
  source 1..42: mol_type = other RNA
taatttctactgttgtagattagcagtatcttctgtcactgg

SEQ ID NO: 4676 - DNA, 22 bp, unidentified
  misc_feature 1..22: note = Description of Unknown:MG29-1-B2M-target site-A1 sequence
  misc_feature 1..22: note = Category: DNA sequence of B2M target site
  source 1..22: mol_type = genomic DNA; note = uncultivated organism sequence
tggcctggaggctatccagcgt

SEQ ID NO: 4677 - DNA, 22 bp, unidentified
  misc_feature 1..22: note = Description of Unknown:MG29-1-B2M-target site-B1 sequence
  misc_feature 1..22: note = Category: DNA sequence of B2M target site
  source 1..22: mol_type = genomic DNA; note = uncultivated organism sequence
cccgatattcctcaggtactcc

SEQ ID NO: 4678 - DNA, 22 bp, unidentified
  misc_feature 1..22: note = Description of Unknown:MG29-1-B2M-target site-C1 sequence
  misc_feature 1..22: note = Category: DNA sequence of B2M target site
  source 1..22: mol_type = genomic DNA; note = uncultivated organism sequence
ccgatattcctcaggtactcca

SEQ ID NO: 4679 - DNA, 22 bp, unidentified
  misc_feature 1..22: note = Description of Unknown:MG29-1-B2M-target site-D1 sequence
  misc_feature 1..22: note = Category: DNA sequence of B2M target site
  source 1..22: mol_type = genomic DNA; note = uncultivated organism sequence
ctcacgtcatccagcagagaat

SEQ ID NO: 4680 - DNA, 22 bp, unidentified
  misc_feature 1..22: note = Description of Unknown:MG29-1-B2M-target site-E1 sequence
  misc_feature 1..22: note = Category: DNA sequence of B2M target site
  source 1..22: mol_type = genomic DNA; note = uncultivated organism sequence
ctgaattgctatgtgtctgggt

SEQ ID NO: 4681 - DNA, 22 bp, unidentified
  misc_feature 1..22: note = Description of Unknown:MG29-1-B2M-target site-F1 sequence
  misc_feature 1..22: note = Category: DNA sequence of B2M target site
  source 1..22: mol_type = genomic DNA; note = uncultivated organism sequence
atccatccgacattgaagttga

SEQ ID NO: 4682 - DNA, 22 bp, unidentified
  misc_feature 1..22: note = Description of Unknown:MG29-1-B2M-target site-G1 sequence
  misc_feature 1..22: note = Category: DNA sequence of B2M target site
  source 1..22: mol_type = genomic DNA; note = uncultivated organism sequence
agcaaggactggtctttctatc

SEQ ID NO: 4683 - DNA, 22 bp, unidentified
  misc_feature 1..22: note = Description of Unknown:MG29-1-B2M-target site-H1 sequence
  misc_feature 1..22: note = Category: DNA sequence of B2M target site
  source 1..22: mol_type = genomic DNA; note = uncultivated organism sequence
tatctcttgtactacactgaat

SEQ ID NO: 4684 - DNA, 22 bp, unidentified
  misc_feature 1..22: note = Description of Unknown:MG29-1-B2M-target site-A2 sequence
  misc_feature 1..22: note = Category: DNA sequence of B2M target site
  source 1..22: mol_type = genomic DNA; note = uncultivated organism sequence
tcacagcccaagatagttaagt

SEQ ID NO: 4685 - DNA, 22 bp, unidentified
  misc_feature 1..22: note = Description of Unknown:MG29-1-B2M-target site-B2 sequence
  misc_feature 1..22: note = Category: DNA sequence of B2M target site
  source 1..22: mol_type = genomic DNA; note = uncultivated organism sequence
tcagtgggggtgaattcagtgt

SEQ ID NO: 4686 - DNA, 22 bp, unidentified
  misc_feature 1..22: note = Description of Unknown:MG29-1-B2M-target site-C2 sequence
  misc_feature 1..22: note = Category: DNA sequence of B2M target site
  source 1..22: mol_type = genomic DNA; note = uncultivated organism sequence
cagtgggggtgaattcagtgta

SEQ ID NO: 4687 - DNA, 22 bp, unidentified
  misc_feature 1..22: note = Description of Unknown:MG29-1-B2M-target site-D2 sequence
  misc_feature 1..22: note = Category: DNA sequence of B2M target site
  source 1..22: mol_type = genomic DNA; note = uncultivated organism sequence
agtgggggtgaattcagtgtag

SEQ ID NO: 4688 - DNA, 22 bp, unidentified
  misc_feature 1..22: note = Description of Unknown:MG29-1-B2M-target site-E2 sequence
  misc_feature 1..22: note = Category: DNA sequence of B2M target site
  source 1..22: mol_type = genomic DNA; note = uncultivated organism sequence
tcaattctctctccattcttca

SEQ ID NO: 4689 - DNA, 22 bp, unidentified
  misc_feature 1..22: note = Description of Unknown:MG29-1-B2M-target site-F2 sequence
  misc_feature 1..22: note = Category: DNA sequence of B2M target site
  source 1..22: mol_type = genomic DNA; note = uncultivated organism sequence
caattctctctccattcttcag

SEQ ID NO: 4690 - DNA, 22 bp, unidentified
  misc_feature 1..22: note = Description of Unknown:MG29-1-B2M-target site-G2 sequence
  misc_feature 1..22: note = Category: DNA sequence of B2M target site
  source 1..22: mol_type = genomic DNA; note = uncultivated organism sequence
aattctctctccattcttcagt

SEQ ID NO: 4691 - DNA, 22 bp, unidentified
  misc_feature 1..22: note = Description of Unknown:MG29-1-B2M-target site-H2 sequence
  misc_feature 1..22: note = Category: DNA sequence of B2M target site
  source 1..22: mol_type = genomic DNA; note = uncultivated organism sequence
actttccattctctgctggatg

SEQ ID NO: 4692 - DNA, 22 bp, unidentified
  misc_feature 1..22: note = Description of Unknown:MG29-1-B2M-target site-A3 sequence
  misc_feature 1..22: note = Category: DNA sequence of B2M target site
  source 1..22: mol_type = genomic DNA; note = uncultivated organism sequence
cattctctgctggatgacgtga

SEQ ID NO: 4693 - DNA, 22 bp, unidentified
  misc_feature 1..22: note = Description of Unknown:MG29-1-B2M-target site-B3 sequence
  misc_feature 1..22: note = Category: DNA sequence of B2M target site
  source 1..22: mol_type = genomic DNA; note = uncultivated organism sequence
tctccactgtctttttcataga

SEQ ID NO: 4694 - DNA, 22 bp, unidentified
  misc_feature 1..22: note = Description of Unknown:MG29-1-B2M-target site-C3 sequence
  misc_feature 1..22: note = Category: DNA sequence of B2M target site
  source 1..22: mol_type = genomic DNA; note = uncultivated organism sequence
ctccactgtctttttcatagat

SEQ ID NO: 4695 - DNA, 22 bp, unidentified
  misc_feature 1..22: note = Description of Unknown:MG29-1-B2M-target site-D3 sequence
  misc_feature 1..22: note = Category: DNA sequence of B2M target site
  source 1..22: mol_type = genomic DNA; note = uncultivated organism sequence
tccactgtctttttcatagatc

SEQ ID NO: 4696 - DNA, 22 bp, unidentified
  misc_feature 1..22: note = Description of Unknown:MG29-1-B2M-target site-E3 sequence
  misc_feature 1..22: note = Category: DNA sequence of B2M target site
  source 1..22: mol_type = genomic DNA; note = uncultivated organism sequence
tcatagatcgagacatgtaagc

SEQ ID NO: 4697 - DNA, 22 bp, unidentified
  misc_feature 1..22: note = Description of Unknown:MG29-1-B2M-target site-F3 sequence
  misc_feature 1..22: note = Category: DNA sequence of B2M target site
  source 1..22: mol_type = genomic DNA; note = uncultivated organism sequence
catagatcgagacatgtaagca

SEQ ID NO: 4698 - DNA, 22 bp, unidentified
  misc_feature 1..22: note = Description of Unknown:MG29-1-B2M-target site-G3 sequence
  misc_feature 1..22: note = Category: DNA sequence of B2M target site
  source 1..22: mol_type = genomic DNA; note = uncultivated organism sequence
tggcctggaggctatccagcgt

SEQ ID NO: 4699 - DNA, 22 bp, unidentified
  misc_feature 1..22: note = Description of Unknown:MG29-1-B2M-target site-H3 sequence
  misc_feature 1..22: note = Category: DNA sequence of B2M target site
  source 1..22: mol_type = genomic DNA; note = uncultivated organism sequence
ggcggggagcaggggagacctt

SEQ ID NO: 4700 - DNA, 22 bp, unidentified
  misc_feature 1..22: note = Description of Unknown:MG29-1-B2M-target site-A4 sequence
  misc_feature 1..22: note = Category: DNA sequence of B2M target site
  source 1..22: mol_type = genomic DNA; note = uncultivated organism sequence
gcctacggcgacgggagggtcg

SEQ ID NO: 4701 - DNA, 22 bp, unidentified
  misc_feature 1..22: note = Description of Unknown:MG29-1-B2M-target site-B4 sequence
  misc_feature 1..22: note = Category: DNA sequence of B2M target site
  source 1..22: mol_type = genomic DNA; note = uncultivated organism sequence
gggcgtcgataagcgtcagagc

SEQ ID NO: 4702 - DNA, 22 bp, unidentified
  misc_feature 1..22: note = Description of Unknown:MG29-1-B2M-target site-C4 sequence
  misc_feature 1..22: note = Category: DNA sequence of B2M target site
  source 1..22: mol_type = genomic DNA; note = uncultivated organism sequence
tcttccgctctttcgcggggcc

SEQ ID NO: 4703 - DNA, 22 bp, unidentified
  misc_feature 1..22: note = Description of Unknown:MG29-1-B2M-target site-D4 sequence
  misc_feature 1..22: note = Category: DNA sequence of B2M target site
  source 1..22: mol_type = genomic DNA; note = uncultivated organism sequence
gcggggcctctggctcccccag

SEQ ID NO: 4704 - DNA, 22 bp, unidentified
  misc_feature 1..22: note = Description of Unknown:MG29-1-B2M-target site-E4 sequence
  misc_feature 1..22: note = Category: DNA sequence of B2M target site
  source 1..22: mol_type = genomic DNA; note = uncultivated organism sequence
tgaacgcgtggaggggcgcttg

SEQ ID NO: 4705 - DNA, 22 bp, unidentified
  misc_feature 1..22: note = Description of Unknown:MG29-1-B2M-target site-F4 sequence
  misc_feature 1..22: note = Category: DNA sequence of B2M target site
  source 1..22: mol_type = genomic DNA; note = uncultivated organism sequence
ctccccacggtgtggccccaca

SEQ ID NO: 4706 - DNA, 22 bp, unidentified
  misc_feature 1..22: note = Description of Unknown:MG29-1-B2M-target site-G4 sequence
  misc_feature 1..22: note = Category: DNA sequence of B2M target site
  source 1..22: mol_type = genomic DNA; note = uncultivated organism sequence
ggacgagcctacccgtccccca

SEQ ID NO: 4707 - DNA, 22 bp, unidentified
  misc_feature 1..22: note = Description of Unknown:MG29-1-B2M-target site-H4 sequence
  misc_feature 1..22: note = Category: DNA sequence of B2M target site
  source 1..22: mol_type = genomic DNA; note = uncultivated organism sequence
tcccgaccctcccgtcgccgta

SEQ ID NO: 4708 - DNA, 22 bp, unidentified
  misc_feature 1..22: note = Description of Unknown:MG29-1-B2M-target site-A5 sequence
  misc_feature 1..22: note = Category: DNA sequence of B2M target site
  source 1..22: mol_type = genomic DNA; note = uncultivated organism sequence
gcgggagcgcatgccttttggc

SEQ ID NO: 4709 - DNA, 22 bp, unidentified
  misc_feature 1..22: note = Description of Unknown:MG29-1-B2M-target site-B5 sequence
  misc_feature 1..22: note = Category: DNA sequence of B2M target site
  source 1..22: mol_type = genomic DNA; note = uncultivated organism sequence
cgggagcgcatgccttttggct

SEQ ID NO: 4710 - DNA, 22 bp, unidentified
  misc_feature 1..22: note = Description of Unknown:MG29-1-B2M-target site-C5 sequence
  misc_feature 1..22: note = Category: DNA sequence of B2M target site
  source 1..22: mol_type = genomic DNA; note = uncultivated organism sequence
ggctgtaattcgtgcatttttt

SEQ ID NO: 4711 - DNA, 22 bp, unidentified
  misc_feature 1..22: note = Description of Unknown:MG29-1-B2M-target site-D5 sequence
  misc_feature 1..22: note = Category: DNA sequence of B2M target site
  source 1..22: mol_type = genomic DNA; note = uncultivated organism sequence
gctgtaattcgtgcattttttt

SEQ ID NO: 4712 - DNA, 22 bp, unidentified
  misc_feature 1..22: note = Description of Unknown:MG29-1-B2M-target site-E5 sequence
  misc_feature 1..22: note = Category: DNA sequence of B2M target site
  source 1..22: mol_type = genomic DNA; note = uncultivated organism sequence
tttttaagaaaaacgcctgcct

SEQ ID NO: 4713 - DNA, 22 bp, unidentified
  misc_feature 1..22: note = Description of Unknown:MG29-1-B2M-target site-F5 sequence
  misc_feature 1..22: note = Category: DNA sequence of B2M target site
  source 1..22: mol_type = genomic DNA; note = uncultivated organism sequence
ttttaagaaaaacgcctgcctt

SEQ ID NO: 4714 - DNA, 22 bp, unidentified
  misc_feature 1..22: note = Description of Unknown:MG29-1-B2M-target site-G5 sequence
  misc_feature 1..22: note = Category: DNA sequence of B2M target site
  source 1..22: mol_type = genomic DNA; note = uncultivated organism sequence
tttaagaaaaacgcctgccttc

SEQ ID NO: 4715 - DNA, 22 bp, unidentified
  misc_feature 1..22: note = Description of Unknown:MG29-1-B2M-target site-H5 sequence
  misc_feature 1..22: note = Category: DNA sequence of B2M target site
  source 1..22: mol_type = genomic DNA; note = uncultivated organism sequence
ttaagaaaaacgcctgccttct

SEQ ID NO: 4716 - DNA, 22 bp, unidentified
  misc_feature 1..22: note = Description of Unknown:MG29-1-B2M-target site-A6 sequence
  misc_feature 1..22: note = Category: DNA sequence of B2M target site
  source 1..22: mol_type = genomic DNA; note = uncultivated organism sequence
taagaaaaacgcctgccttctg

SEQ ID NO: 4717 - DNA, 22 bp, unidentified
  misc_feature 1..22: note = Description of Unknown:MG29-1-B2M-target site-B6 sequence
  misc_feature 1..22: note = Category: DNA sequence of B2M target site
  source 1..22: mol_type = genomic DNA; note = uncultivated organism sequence
aagaaaaacgcctgccttctgc

SEQ ID NO: 4718 - DNA, 22 bp, unidentified
  misc_feature 1..22: note = Description of Unknown:MG29-1-B2M-target site-C6 sequence
  misc_feature 1..22: note = Category: DNA sequence of B2M target site
  source 1..22: mol_type = genomic DNA; note = uncultivated organism sequence
agaaaaacgcctgccttctgcg

SEQ ID NO: 4719 - DNA, 22 bp, unidentified
  misc_feature 1..22: note = Description of Unknown:MG29-1-B2M-target site-D6 sequence
  misc_feature 1..22: note = Category: DNA sequence of B2M target site
  source 1..22: mol_type = genomic DNA; note = uncultivated organism sequence
cgtacagagggcttcctctttg

SEQ ID NO: 4720 - DNA, 22 bp, unidentified
  misc_feature 1..22: note = Description of Unknown:MG29-1-B2M-target site-E6 sequence
  misc_feature 1..22: note = Category: DNA sequence of B2M target site
  source 1..22: mol_type = genomic DNA; note = uncultivated organism sequence
gtacagagggcttcctctttgg

SEQ ID NO: 4721 - DNA, 22 bp, unidentified
  misc_feature 1..22: note = Description of Unknown:MG29-1-B2M-target site-F6 sequence
  misc_feature 1..22: note = Category: DNA sequence of B2M target site
  source 1..22: mol_type = genomic DNA; note = uncultivated organism sequence
gctctttgcctggttgtttcca

SEQ ID NO: 4722 - DNA, 22 bp, unidentified
  misc_feature 1..22: note = Description of Unknown:MG29-1-B2M-target site-G6 sequence
  misc_feature 1..22: note = Category: DNA sequence of B2M target site
  source 1..22: mol_type = genomic DNA; note = uncultivated organism sequence
cctggttgtttccaagatgtac

SEQ ID NO: 4723 - DNA, 22 bp, unidentified
  misc_feature 1..22: note = Description of Unknown:MG29-1-B2M-target site-H6 sequence
  misc_feature 1..22: note = Category: DNA sequence of B2M target site
  source 1..22: mol_type = genomic DNA; note = uncultivated organism sequence
caagatgtactgtgcctcttac

SEQ ID NO: 4724 - DNA, 22 bp, unidentified
  misc_feature 1..22: note = Description of Unknown:MG29-1-B2M-target site-A7 sequence
  misc_feature 1..22: note = Category: DNA sequence of B2M target site
  source 1..22: mol_type = genomic DNA; note = uncultivated organism sequence
caaaaccgaaagtaagaggcac

SEQ ID NO: 4725 - DNA, 22 bp, unidentified
  misc_feature 1..22: note = Description of Unknown:MG29-1-B2M-target site-B7 sequence
  misc_feature 1..22: note = Category: DNA sequence of B2M target site
  source 1..22: mol_type = genomic DNA; note = uncultivated organism sequence
aaaaccgaaagtaagaggcaca

SEQ ID NO: 4726 - DNA, 22 bp, unidentified
  misc_feature 1..22: note = Description of Unknown:MG29-1-B2M-target site-C7 sequence
  misc_feature 1..22: note = Category: DNA sequence of B2M target site
  source 1..22: mol_type = genomic DNA; note = uncultivated organism sequence
ctctggagaatctcacgcagaa

SEQ ID NO: 4727 - DNA, 22 bp, unidentified
  misc_feature 1..22: note = Description of Unknown:MG29-1-B2M-target site-D7 sequence
  misc_feature 1..22: note = Category: DNA sequence of B2M target site
  source 1..22: mol_type = genomic DNA; note = uncultivated organism sequence
tcttaaaaaaaaatgcacgaat

SEQ ID NO: 4728 - DNA, 22 bp, unidentified
  misc_feature 1..22: note = Description of Unknown:MG29-1-B2M-target site-E7 sequence
  misc_feature 1..22: note = Category: DNA sequence of B2M target site
  source 1..22: mol_type = genomic DNA; note = uncultivated organism sequence
cttaaaaaaaaatgcacgaatt

SEQ ID NO: 4729 - DNA, 22 bp, unidentified
  misc_feature 1..22: note = Description of Unknown:MG29-1-B2M-target site-F7 sequence
  misc_feature 1..22: note = Category: DNA sequence of B2M target site
  source 1..22: mol_type = genomic DNA; note = uncultivated organism sequence
ttaaaaaaaaatgcacgaatta

SEQ ID NO: 4730 - DNA, 22 bp, unidentified
  misc_feature 1..22: note = Description of Unknown:MG29-1-B2M-target site-G7 sequence
  misc_feature 1..22: note = Category: DNA sequence of B2M target site
  source 1..22: mol_type = genomic DNA; note = uncultivated organism sequence
ttcttcaaaatggaggtggctt

SEQ ID NO: 4731 - DNA, 22 bp, unidentified
  misc_feature 1..22: note = Description of Unknown:MG29-1-B2M-target site-H7 sequence
  misc_feature 1..22: note = Category: DNA sequence of B2M target site
  source 1..22: mol_type = genomic DNA; note = uncultivated organism sequence
gccagagtggaaatggaattgg

SEQ ID NO: 4732 - DNA, 22 bp, unidentified
  misc_feature 1..22: note = Description of Unknown:MG29-1-B2M-target site-A8 sequence
  misc_feature 1..22: note = Category: DNA sequence of B2M target site
  source 1..22: mol_type = genomic DNA; note = uncultivated organism sequence
gagtacctgaggaatatcggga

SEQ ID NO: 4733 - DNA, 22 bp, unidentified
  misc_feature 1..22: note = Description of Unknown:MG29-1-B2M-target site-B8 sequence
  misc_feature 1..22: note = Category: DNA sequence of B2M target site
  source 1..22: mol_type = genomic DNA; note = uncultivated organism sequence
acttggggctaacttggtgtca

SEQ ID NO: 4734 - DNA, 22 bp, unidentified
  misc_feature 1..22: note = Description of Unknown:MG29-1-B2M-target site-C8 sequence
  misc_feature 1..22: note = Category: DNA sequence of B2M target site
  source 1..22: mol_type = genomic DNA; note = uncultivated organism sequence
catttggtcatcgatttctccc

SEQ ID NO: 4735 - DNA, 22 bp, unidentified
  misc_feature 1..22: note = Description of Unknown:MG29-1-B2M-target site-D8 sequence
  misc_feature 1..22: note = Category: DNA sequence of B2M target site
  source 1..22: mol_type = genomic DNA; note = uncultivated organism sequence
gtcatcgatttctcccaattcc

SEQ ID NO: 4736 - DNA, 22 bp, unidentified
  misc_feature 1..22: note = Description of Unknown:MG29-1-B2M-target site-E8 sequence
  misc_feature 1..22: note = Category: DNA sequence of B2M target site
  source 1..22: mol_type = genomic DNA; note = uncultivated organism sequence
tcccaattccatttccactctg

SEQ ID NO: 4737 - DNA, 22 bp, unidentified
  misc_feature 1..22: note = Description of Unknown:MG29-1-B2M-target site-F8 sequence
  misc_feature 1..22: note = Category: DNA sequence of B2M target site
  source 1..22: mol_type = genomic DNA; note = uncultivated organism sequence
cactctggccaaatgagcttcc

SEQ ID NO: 4738 - DNA, 22 bp, unidentified
  misc_feature 1..22: note = Description of Unknown:MG29-1-B2M-target site-G8 sequence
  misc_feature 1..22: note = Category: DNA sequence of B2M target site
  source 1..22: mol_type = genomic DNA; note = uncultivated organism sequence
gaagaataaaccgtgacttggt

SEQ ID NO: 4739 - DNA, 22 bp, unidentified
  misc_feature 1..22: note = Description of Unknown:MG29-1-B2M-target site-H8 sequence
  misc_feature 1..22: note = Category: DNA sequence of B2M target site
  source 1..22: mol_type = genomic DNA; note = uncultivated organism sequence
aagaataaaccgtgacttggta

SEQ ID NO: 4740 - DNA, 22 bp, unidentified
  misc_feature 1..22: note = Description of Unknown:MG29-1-B2M-target site-A9 sequence
  misc_feature 1..22: note = Category: DNA sequence of B2M target site
  source 1..22: mol_type = genomic DNA; note = uncultivated organism sequence
cctcataattcctctatacatg

SEQ ID NO: 4741 - DNA, 22 bp, unidentified
  misc_feature 1..22: note = Description of Unknown:MG29-1-B2M-target site-B9 sequence
  misc_feature 1..22: note = Category: DNA sequence of B2M target site
  source 1..22: mol_type = genomic DNA; note = uncultivated organism sequence
ttgttttttttctagcagattt

SEQ ID NO: 4742 - DNA, 22 bp, unidentified
  misc_feature 1..22: note = Description of Unknown:MG29-1-B2M-target site-C9 sequence
  misc_feature 1..22: note = Category: DNA sequence of B2M target site
  source 1..22: mol_type = genomic DNA; note = uncultivated organism sequence
tgttttttttctagcagatttc

SEQ ID NO: 4743 - DNA, 22 bp, unidentified
  misc_feature 1..22: note = Description of Unknown:MG29-1-B2M-target site-D9 sequence
  misc_feature 1..22: note = Category: DNA sequence of B2M target site
  source 1..22: mol_type = genomic DNA; note = uncultivated organism sequence
gttttttttctagcagatttct

SEQ ID NO: 4744 - DNA, 22 bp, unidentified
  misc_feature 1..22: note = Description of Unknown:MG29-1-B2M-target site-E9 sequence
  misc_feature 1..22: note = Category: DNA sequence of B2M target site
  source 1..22: mol_type = genomic DNA; note = uncultivated organism sequence
ttttttttctagcagatttcta

SEQ ID NO: 4745 - DNA, 22 bp, unidentified
  misc_feature 1..22: note = Description of Unknown:MG29-1-B2M-target site-F9 sequence
  misc_feature 1..22: note = Category: DNA sequence of B2M target site
  source 1..22: mol_type = genomic DNA; note = uncultivated organism sequence
ttttctagcagatttctagcag

SEQ ID NO: 4746 - DNA, 22 bp, unidentified
  misc_feature 1..22: note = Description of Unknown:MG29-1-B2M-target site-G9 sequence
  misc_feature 1..22: note = Category: DNA sequence of B2M target site
  source 1..22: mol_type = genomic DNA; note = uncultivated organism sequence
tttctagcagatttctagcagt

SEQ ID NO: 4747 - DNA, 22 bp, unidentified
  misc_feature 1..22: note = Description of Unknown:MG29-1-B2M-target site-H9 sequence
  misc_feature 1..22: note = Category: DNA sequence of B2M target site
  source 1..22: mol_type = genomic DNA; note = uncultivated organism sequence
ttctagcagatttctagcagta

SEQ ID NO: 4748 - DNA, 22 bp, unidentified
  misc_feature 1..22: note = Description of Unknown:MG29-1-B2M-target site-A10 sequence
  misc_feature 1..22: note = Category: DNA sequence of B2M target site
  source 1..22: mol_type = genomic DNA; note = uncultivated organism sequence
tctagcagatttctagcagtat

SEQ ID NO: 4749 - DNA, 22 bp, unidentified
  misc_feature 1..22: note = Description of Unknown:MG29-1-B2M-target site-B10 sequence
  misc_feature 1..22: note = Category: DNA sequence of B2M target site
  source 1..22: mol_type = genomic DNA; note = uncultivated organism sequence
ctagcagatttctagcagtatc

SEQ ID NO: 4750 - DNA, 22 bp, unidentified
  misc_feature 1..22: note = Description of Unknown:MG29-1-B2M-target site-C10 sequence
  misc_feature 1..22: note = Category: DNA sequence of B2M target site
  source 1..22: mol_type = genomic DNA; note = uncultivated organism sequence
tagcagatttctagcagtatct

SEQ ID NO: 4751 - DNA, 22 bp, unidentified
  misc_feature 1..22: note = Description of Unknown:MG29-1-B2M-target site-D10 sequence
  misc_feature 1..22: note = Category: DNA sequence of B2M target site
  source 1..22: mol_type = genomic DNA; note = uncultivated organism sequence
tagcagtatcttctgtcactgg

SEQ ID NO: 4752 - RNA, 42 nt, synthetic construct
  misc_feature 1..42: note = Category: MG29-1 sgRNA targeting CD2
  misc_feature 1..42: note = Description: MG29-1-CD2-sgRNA-A1
  source 1..42: mol_type = other RNA
taatttctactgttgtagatcatgtaaatttgtagccagctt

SEQ ID NO: 4753 - RNA, 42 nt, synthetic construct
  misc_feature 1..42: note = Category: MG29-1 sgRNA targeting CD2
  misc_feature 1..42: note = Description: MG29-1-CD2-sgRNA-B1
  source 1..42: mol_type = other RNA
taatttctactgttgtagattagccagcttccttctgatttt

SEQ ID NO: 4754 - RNA, 42 nt, synthetic construct
  misc_feature 1..42: note = Category: MG29-1 sgRNA targeting CD2
  misc_feature 1..42: note = Description: MG29-1-CD2-sgRNA-C1
  source 1..42: mol_type = other RNA
taatttctactgttgtagatactcttatgcttacctttggaa

SEQ ID NO: 4755 - RNA, 42 nt, synthetic construct
  misc_feature 1..42: note = Category: MG29-1 sgRNA targeting CD2
  misc_feature 1..42: note = Description: MG29-1-CD2-sgRNA-D1
  source 1..42: mol_type = other RNA
taatttctactgttgtagatgaagaaacattgaaaatcagaa

SEQ ID NO: 4756 - RNA, 42 nt, synthetic construct
  misc_feature 1..42: note = Category: MG29-1 sgRNA targeting CD2
  misc_feature 1..42: note = Description: MG29-1-CD2-sgRNA-E1
  source 1..42: mol_type = other RNA
taatttctactgttgtagatgctttttataggtgcagtctcc

SEQ ID NO: 4757 - RNA, 42 nt, synthetic construct
  misc_feature 1..42: note = Category: MG29-1 sgRNA targeting CD2
  misc_feature 1..42: note = Description: MG29-1-CD2-sgRNA-F1
  source 1..42: mol_type = other RNA
taatttctactgttgtagatctttttataggtgcagtctcca

SEQ ID NO: 4758 - RNA, 42 nt, synthetic construct
  misc_feature 1..42: note = Category: MG29-1 sgRNA targeting CD2
  misc_feature 1..42: note = Description: MG29-1-CD2-sgRNA-G1
  source 1..42: mol_type = other RNA
taatttctactgttgtagattataggtgcagtctccaaagag

SEQ ID NO: 4759 - RNA, 42 nt, synthetic construct
  misc_feature 1..42: note = Category: MG29-1 sgRNA targeting CD2
  misc_feature 1..42: note = Description: MG29-1-CD2-sgRNA-H1
  source 1..42: mol_type = other RNA
taatttctactgttgtagatataggtgcagtctccaaagaga

SEQ ID NO: 4760 - RNA, 42 nt, synthetic construct
  misc_feature 1..42: note = Category: MG29-1 sgRNA targeting CD2
  misc_feature 1..42: note = Description: MG29-1-CD2-sgRNA-A2
  source 1..42: mol_type = other RNA
taatttctactgttgtagattaggtgcagtctccaaagagat

SEQ ID NO: 4761 - RNA, 42 nt, synthetic construct
  misc_feature 1..42: note = Category: MG29-1 sgRNA targeting CD2
  misc_feature 1..42: note = Description: MG29-1-CD2-sgRNA-B2
  source 1..42: mol_type = other RNA
taatttctactgttgtagatcaaatgagtgatgatattgacg

SEQ ID NO: 4762 - RNA, 42 nt, synthetic construct
  misc_feature 1..42: note = Category: MG29-1 sgRNA targeting CD2
  misc_feature 1..42: note = Description: MG29-1-CD2-sgRNA-C2
  source 1..42: mol_type = other RNA
taatttctactgttgtagataaatgagtgatgatattgacga

SEQ ID NO: 4763 - RNA, 42 nt, synthetic construct
  misc_feature 1..42: note = Category: MG29-1 sgRNA targeting CD2
  misc_feature 1..42: note = Description: MG29-1-CD2-sgRNA-D2
  source 1..42: mol_type = other RNA
taatttctactgttgtagataaggaaaaagatacatataagc

SEQ ID NO: 4764 - RNA, 42 nt, synthetic construct
  misc_feature 1..42: note = Category: MG29-1 sgRNA targeting CD2
  misc_feature 1..42: note = Description: MG29-1-CD2-sgRNA-E2
  source 1..42: mol_type = other RNA
taatttctactgttgtagataaaatggaactctgaaaattaa

SEQ ID NO: 4765 - RNA, 42 nt, synthetic construct
  misc_feature 1..42: note = Category: MG29-1 sgRNA targeting CD2
  misc_feature 1..42: note = Description: MG29-1-CD2-sgRNA-F2
  source 1..42: mol_type = other RNA
taatttctactgttgtagatttccaacacattttttcctttt

SEQ ID NO: 4766 - RNA, 42 nt, synthetic construct
  misc_feature 1..42: note = Category: MG29-1 sgRNA targeting CD2
  misc_feature 1..42: note = Description: MG29-1-CD2-sgRNA-G2
  source 1..42: mol_type = other RNA
taatttctactgttgtagattccaacacattttttccttttg

SEQ ID NO: 4767 - RNA, 42 nt, synthetic construct
  misc_feature 1..42: note = Category: MG29-1 sgRNA targeting CD2
  misc_feature 1..42: note = Description: MG29-1-CD2-sgRNA-H2
  source 1..42: mol_type = other RNA
taatttctactgttgtagatccaacacattttttccttttgt

SEQ ID NO: 4768 - RNA, 42 nt, synthetic construct
  misc_feature 1..42: note = Category: MG29-1 sgRNA targeting CD2
  misc_feature 1..42: note = Description: MG29-1-CD2-sgRNA-A3
  source 1..42: mol_type = other RNA
taatttctactgttgtagatcaacacattttttccttttgta

SEQ ID NO: 4769 - RNA, 42 nt, synthetic construct
  misc_feature 1..42: note = Category: MG29-1 sgRNA targeting CD2
  misc_feature 1..42: note = Description: MG29-1-CD2-sgRNA-B3
  source 1..42: mol_type = other RNA
taatttctactgttgtagatttccttttgtatcatatattga

SEQ ID NO: 4770 - RNA, 42 nt, synthetic construct
  misc_feature 1..42: note = Category: MG29-1 sgRNA targeting CD2
  misc_feature 1..42: note = Description: MG29-1-CD2-sgRNA-C3
  source 1..42: mol_type = other RNA
taatttctactgttgtagattccttttgtatcatatattgat

SEQ ID NO: 4771 - RNA, 42 nt, synthetic construct
  misc_feature 1..42: note = Category: MG29-1 sgRNA targeting CD2
  misc_feature 1..42: note = Description: MG29-1-CD2-sgRNA-D3
  source 1..42: mol_type = other RNA
taatttctactgttgtagatccttttgtatcatatattgata

SEQ ID NO: 4772 - RNA, 42 nt, synthetic construct
  misc_feature 1..42: note = Category: MG29-1 sgRNA targeting CD2
  misc_feature 1..42: note = Description: MG29-1-CD2-sgRNA-E3
  source 1..42: mol_type = other RNA
taatttctactgttgtagatcttttgtatcatatattgatac

SEQ ID NO: 4773 - RNA, 42 nt, synthetic construct
  misc_feature 1..42: note = Category: MG29-1 sgRNA targeting CD2
  misc_feature 1..42: note = Description: MG29-1-CD2-sgRNA-F3
  source 1..42: mol_type = other RNA
taatttctactgttgtagatgtatcatatattgataccttgt

SEQ ID NO: 4774 - RNA, 42 nt, synthetic construct
  misc_feature 1..42: note = Category: MG29-1 sgRNA targeting CD2
  misc_feature 1..42: note = Description: MG29-1-CD2-sgRNA-G3
  source 1..42: mol_type = other RNA
taatttctactgttgtagattatcatatattgataccttgta

SEQ ID NO: 4775 - RNA, 42 nt, synthetic construct
  misc_feature 1..42: note = Category: MG29-1 sgRNA targeting CD2
  misc_feature 1..42: note = Description: MG29-1-CD2-sgRNA-H3
  source 1..42: mol_type = other RNA
taatttctactgttgtagatcagagttccatttttaaatagc

SEQ ID NO: 4776 - RNA, 42 nt, synthetic construct
  misc_feature 1..42: note = Category: MG29-1 sgRNA targeting CD2
  misc_feature 1..42: note = Description: MG29-1-CD2-sgRNA-A4
  source 1..42: mol_type = other RNA
taatttctactgttgtagatagagttccatttttaaatagct

SEQ ID NO: 4777 - RNA, 42 nt, synthetic construct
  misc_feature 1..42: note = Category: MG29-1 sgRNA targeting CD2
  misc_feature 1..42: note = Description: MG29-1-CD2-sgRNA-B4
  source 1..42: mol_type = other RNA
taatttctactgttgtagattaaatagcttatatgtatcttt

SEQ ID NO: 4778 - RNA, 42 nt, synthetic construct
  misc_feature 1..42: note = Category: MG29-1 sgRNA targeting CD2
  misc_feature 1..42: note = Description: MG29-1-CD2-sgRNA-C4
  source 1..42: mol_type = other RNA
taatttctactgttgtagataaatagcttatatgtatctttt

SEQ ID NO: 4779 - RNA, 42 nt, synthetic construct
  misc_feature 1..42: note = Category: MG29-1 sgRNA targeting CD2
  misc_feature 1..42: note = Description: MG29-1-CD2-sgRNA-D4
  source 1..42: mol_type = other RNA
taatttctactgttgtagataatagcttatatgtatcttttt

SEQ ID NO: 4780 - RNA, 42 nt, synthetic construct
  misc_feature 1..42: note = Category: MG29-1 sgRNA targeting CD2
  misc_feature 1..42: note = Description: MG29-1-CD2-sgRNA-E4
  source 1..42: mol_type = other RNA
taatttctactgttgtagattccttgaaagtctctttctctt

SEQ ID NO: 4781 - RNA, 42 nt, synthetic construct
  misc_feature 1..42: note = Category: MG29-1 sgRNA targeting CD2
  misc_feature 1..42: note = Description: MG29-1-CD2-sgRNA-F4
  source 1..42: mol_type = other RNA
taatttctactgttgtagatccttgaaagtctctttctcttt

SEQ ID NO: 4782 - RNA, 42 nt, synthetic construct
  misc_feature 1..42: note = Category: MG29-1 sgRNA targeting CD2
  misc_feature 1..42: note = Description: MG29-1-CD2-sgRNA-G4
  source 1..42: mol_type = other RNA
taatttctactgttgtagatcttgaaagtctctttctctttt

SEQ ID NO: 4783 - RNA, 42 nt, synthetic construct
  misc_feature 1..42: note = Category: MG29-1 sgRNA targeting CD2
  misc_feature 1..42: note = Description: MG29-1-CD2-sgRNA-H4
  source 1..42: mol_type = other RNA
taatttctactgttgtagattcttttctgaattgtgcaatct

SEQ ID NO: 4784 - RNA, 42 nt, synthetic construct
  misc_feature 1..42: note = Category: MG29-1 sgRNA targeting CD2
  misc_feature 1..42: note = Description: MG29-1-CD2-sgRNA-A5
  source 1..42: mol_type = other RNA
taatttctactgttgtagatctgaattgtgcaatctttttct

SEQ ID NO: 4785 - RNA, 42 nt, synthetic construct
  misc_feature 1..42: note = Category: MG29-1 sgRNA targeting CD2
  misc_feature 1..42: note = Description: MG29-1-CD2-sgRNA-B5
  source 1..42: mol_type = other RNA
taatttctactgttgtagattgaattgtgcaatctttttctt

SEQ ID NO: 4786 - RNA, 42 nt, synthetic construct
  misc_feature 1..42: note = Category: MG29-1 sgRNA targeting CD2
  misc_feature 1..42: note = Description: MG29-1-CD2-sgRNA-C5
  source 1..42: mol_type = other RNA
taatttctactgttgtagattcttgtctgaagttttttccca

SEQ ID NO: 4787 - RNA, 42 nt, synthetic construct
  misc_feature 1..42: note = Category: MG29-1 sgRNA targeting CD2
  misc_feature 1..42: note = Description: MG29-1-CD2-sgRNA-D5
  source 1..42: mol_type = other RNA
taatttctactgttgtagatcttgtctgaagttttttcccat

SEQ ID NO: 4788 - RNA, 42 nt, synthetic construct
  misc_feature 1..42: note = Category: MG29-1 sgRNA targeting CD2
  misc_feature 1..42: note = Description: MG29-1-CD2-sgRNA-E5
  source 1..42: mol_type = other RNA
taatttctactgttgtagatttgtctgaagttttttcccatt

SEQ ID NO: 4789 - RNA, 42 nt, synthetic construct
  misc_feature 1..42: note = Category: MG29-1 sgRNA targeting CD2
  misc_feature 1..42: note = Description: MG29-1-CD2-sgRNA-F5
  source 1..42: mol_type = other RNA
taatttctactgttgtagatttcccattttatatcgtcaata

SEQ ID NO: 4790 - RNA, 42 nt, synthetic construct
  misc_feature 1..42: note = Category: MG29-1 sgRNA targeting CD2
  misc_feature 1..42: note = Description: MG29-1-CD2-sgRNA-G5
  source 1..42: mol_type = other RNA
taatttctactgttgtagattcccattttatatcgtcaatat

SEQ ID NO: 4791 - RNA, 42 nt, synthetic construct
  misc_feature 1..42: note = Category: MG29-1 sgRNA targeting CD2
  misc_feature 1..42: note = Description: MG29-1-CD2-sgRNA-H5
  source 1..42: mol_type = other RNA
taatttctactgttgtagatcccattttatatcgtcaatatc

SEQ ID NO: 4792 - RNA, 42 nt, synthetic construct
  misc_feature 1..42: note = Category: MG29-1 sgRNA targeting CD2
  misc_feature 1..42: note = Description: MG29-1-CD2-sgRNA-A6
  source 1..42: mol_type = other RNA
taatttctactgttgtagatccattttatatcgtcaatatca

SEQ ID NO: 4793 - RNA, 42 nt, synthetic construct
  misc_feature 1..42: note = Category: MG29-1 sgRNA targeting CD2
  misc_feature 1..42: note = Description: MG29-1-CD2-sgRNA-B6
  source 1..42: mol_type = other RNA
taatttctactgttgtagatatatcgtcaatatcatcactca

SEQ ID NO: 4794 - RNA, 42 nt, synthetic construct
  misc_feature 1..42: note = Category: MG29-1 sgRNA targeting CD2
  misc_feature 1..42: note = Description: MG29-1-CD2-sgRNA-C6
  source 1..42: mol_type = other RNA
taatttctactgttgtagattatcgtcaatatcatcactcat

SEQ ID NO: 4795 - RNA, 42 nt, synthetic construct
  misc_feature 1..42: note = Category: MG29-1 sgRNA targeting CD2
  misc_feature 1..42: note = Description: MG29-1-CD2-sgRNA-D6
  source 1..42: mol_type = other RNA
taatttctactgttgtagataaaactaggaatgtccaagttg

SEQ ID NO: 4796 - RNA, 42 nt, synthetic construct
  misc_feature 1..42: note = Category: MG29-1 sgRNA targeting CD2
  misc_feature 1..42: note = Description: MG29-1-CD2-sgRNA-E6
  source 1..42: mol_type = other RNA
taatttctactgttgtagatcaaggcattcgtaatctctttg

SEQ ID NO: 4797 - RNA, 42 nt, synthetic construct
  misc_feature 1..42: note = Category: MG29-1 sgRNA targeting CD2
  misc_feature 1..42: note = Description: MG29-1-CD2-sgRNA-F6
  source 1..42: mol_type = other RNA
taatttctactgttgtagatctttctttttagagagggtctc

SEQ ID NO: 4798 - RNA, 42 nt, synthetic construct
  misc_feature 1..42: note = Category: MG29-1 sgRNA targeting CD2
  misc_feature 1..42: note = Description: MG29-1-CD2-sgRNA-G6
  source 1..42: mol_type = other RNA
taatttctactgttgtagattttttagagagggtctcaaaac

SEQ ID NO: 4799 - RNA, 42 nt, synthetic construct
  misc_feature 1..42: note = Category: MG29-1 sgRNA targeting CD2
  misc_feature 1..42: note = Description: MG29-1-CD2-sgRNA-H6
  source 1..42: mol_type = other RNA
taatttctactgttgtagattagagagggtctcaaaaccaaa

SEQ ID NO: 4800 - RNA, 42 nt, synthetic construct
  misc_feature 1..42: note = Category: MG29-1 sgRNA targeting CD2
  misc_feature 1..42: note = Description: MG29-1-CD2-sgRNA-A7
  source 1..42: mol_type = other RNA
taatttctactgttgtagatagagagggtctcaaaaccaaag

SEQ ID NO: 4801 - RNA, 42 nt, synthetic construct
  misc_feature 1..42: note = Category: MG29-1 sgRNA targeting CD2
  misc_feature 1..42: note = Description: MG29-1-CD2-sgRNA-B7
  source 1..42: mol_type = other RNA
taatttctactgttgtagatgagagggtctcaaaaccaaaga

SEQ ID NO: 4802 - RNA, 42 nt, synthetic construct
  misc_feature 1..42: note = Category: MG29-1 sgRNA targeting CD2
  misc_feature 1..42: note = Description: MG29-1-CD2-sgRNA-C7
  source 1..42: mol_type = other RNA
taatttctactgttgtagattcagagggtcatcacacacaag

SEQ ID NO: 4803 - RNA, 42 nt, synthetic construct
  misc_feature 1..42: note = Category: MG29-1 sgRNA targeting CD2
  misc_feature 1..42: note = Description: MG29-1-CD2-sgRNA-D7
  source 1..42: mol_type = other RNA
taatttctactgttgtagatttccctgctgtgcacttgaatt

SEQ ID NO: 4804 - RNA, 42 nt, synthetic construct
  misc_feature 1..42: note = Category: MG29-1 sgRNA targeting CD2
  misc_feature 1..42: note = Description: MG29-1-CD2-sgRNA-E7
  source 1..42: mol_type = other RNA
taatttctactgttgtagatgcactcaggctggtggtccact

SEQ ID NO: 4805 - RNA, 42 nt, synthetic construct
  misc_feature 1..42: note = Category: MG29-1 sgRNA targeting CD2
  misc_feature 1..42: note = Description: MG29-1-CD2-sgRNA-F7
  source 1..42: mol_type = other RNA
taatttctactgttgtagatcactcaggctggtggtccactt

SEQ ID NO: 4806 - RNA, 42 nt, synthetic construct
  misc_feature 1..42: note = Category: MG29-1 sgRNA targeting CD2
  misc_feature 1..42: note = Description: MG29-1-CD2-sgRNA-G7
  source 1..42: mol_type = other RNA
taatttctactgttgtagatagatgtttcccatcttgataca

SEQ ID NO: 4807 - RNA, 42 nt, synthetic construct
  misc_feature 1..42: note = Category: MG29-1 sgRNA targeting CD2
  misc_feature 1..42: note = Description: MG29-1-CD2-sgRNA-H7
  source 1..42: mol_type = other RNA
taatttctactgttgtagatgatgtttcccatcttgatacag

SEQ ID NO: 4808 - RNA, 42 nt, synthetic construct
  misc_feature 1..42: note = Category: MG29-1 sgRNA targeting CD2
  misc_feature 1..42: note = Description: MG29-1-CD2-sgRNA-A8
  source 1..42: mol_type = other RNA
taatttctactgttgtagatccatcttgatacaggtttaatt

SEQ ID NO: 4809 - RNA, 42 nt, synthetic construct
  misc_feature 1..42: note = Category: MG29-1 sgRNA targeting CD2
  misc_feature 1..42: note = Description: MG29-1-CD2-sgRNA-B8
  source 1..42: mol_type = other RNA
taatttctactgttgtagatattcggggtcagttccattcat

SEQ ID NO: 4810 - RNA, 42 nt, synthetic construct
  misc_feature 1..42: note = Category: MG29-1 sgRNA targeting CD2
  misc_feature 1..42: note = Description: MG29-1-CD2-sgRNA-C8
  source 1..42: mol_type = other RNA
taatttctactgttgtagatgcagagaaaggtctggacatct

SEQ ID NO: 4811 - RNA, 42 nt, synthetic construct
  misc_feature 1..42: note = Category: MG29-1 sgRNA targeting CD2
  misc_feature 1..42: note = Description: MG29-1-CD2-sgRNA-D8
  source 1..42: mol_type = other RNA
taatttctactgttgtagatcagagaaaggtctggacatcta

SEQ ID NO: 4812 - RNA, 42 nt, synthetic construct
  misc_feature 1..42: note = Category: MG29-1 sgRNA targeting CD2
  misc_feature 1..42: note = Description: MG29-1-CD2-sgRNA-E8
  source 1..42: mol_type = other RNA
taatttctactgttgtagattggcactgctcgttttctatat

SEQ ID NO: 4813 - RNA, 42 nt, synthetic construct
  misc_feature 1..42: note = Category: MG29-1 sgRNA targeting CD2
  misc_feature 1..42: note = Description: MG29-1-CD2-sgRNA-F8
  source 1..42: mol_type = other RNA
taatttctactgttgtagatctatatcaccaaaaggaaaaaa

SEQ ID NO: 4814 - RNA, 42 nt, synthetic construct
  misc_feature 1..42: note = Category: MG29-1 sgRNA targeting CD2
  misc_feature 1..42: note = Description: MG29-1-CD2-sgRNA-G8
  source 1..42: mol_type = other RNA
taatttctactgttgtagattatatcaccaaaaggaaaaaac

SEQ ID NO: 4815 - RNA, 42 nt, synthetic construct
  misc_feature 1..42: note = Category: MG29-1 sgRNA targeting CD2
  misc_feature 1..42: note = Description: MG29-1-CD2-sgRNA-H8
  source 1..42: mol_type = other RNA
taatttctactgttgtagattccgactcctctgttttttcct

SEQ ID NO: 4816 - RNA, 42 nt, synthetic construct
  misc_feature 1..42: note = Category: MG29-1 sgRNA targeting CD2
  misc_feature 1..42: note = Description: MG29-1-CD2-sgRNA-A9
  source 1..42: mol_type = other RNA
taatttctactgttgtagatttccttttggtgatatagaaaa

SEQ ID NO: 4817 - RNA, 42 nt, synthetic construct
  misc_feature 1..42: note = Category: MG29-1 sgRNA targeting CD2
  misc_feature 1..42: note = Description: MG29-1-CD2-sgRNA-B9
  source 1..42: mol_type = other RNA
taatttctactgttgtagattccttttggtgatatagaaaac

SEQ ID NO: 4818 - RNA, 42 nt, synthetic construct
  misc_feature 1..42: note = Category: MG29-1 sgRNA targeting CD2
  misc_feature 1..42: note = Description: MG29-1-CD2-sgRNA-C9
  source 1..42: mol_type = other RNA
taatttctactgttgtagatccttttggtgatatagaaaacg

SEQ ID NO: 4819 - RNA, 42 nt, synthetic construct
  misc_feature 1..42: note = Category: MG29-1 sgRNA targeting CD2
  misc_feature 1..42: note = Description: MG29-1-CD2-sgRNA-D9
  source 1..42: mol_type = other RNA
taatttctactgttgtagatcttttggtgatatagaaaacga

SEQ ID NO: 4820 - RNA, 42 nt, synthetic construct
  misc_feature 1..42: note = Category: MG29-1 sgRNA targeting CD2
  misc_feature 1..42: note = Description: MG29-1-CD2-sgRNA-E9
  source 1..42: mol_type = other RNA
taatttctactgttgtagatggtgatatagaaaacgagcagt

SEQ ID NO: 4821 - RNA, 42 nt, synthetic construct
  misc_feature 1..42: note = Category: MG29-1 sgRNA targeting CD2
  misc_feature 1..42: note = Description: MG29-1-CD2-sgRNA-F9
  source 1..42: mol_type = other RNA
taatttctactgttgtagatgtgatatagaaaacgagcagtg

SEQ ID NO: 4822 - RNA, 42 nt, synthetic construct
  misc_feature 1..42: note = Category: MG29-1 sgRNA targeting CD2
  misc_feature 1..42: note = Description: MG29-1-CD2-sgRNA-G9
  source 1..42: mol_type = other RNA
taatttctactgttgtagattctgcaaaaggaagagaagtgg

SEQ ID NO: 4823 - RNA, 42 nt, synthetic construct
  misc_feature 1..42: note = Category: MG29-1 sgRNA targeting CD2
  misc_feature 1..42: note = Description: MG29-1-CD2-sgRNA-H9
  source 1..42: mol_type = other RNA
taatttctactgttgtagatgttgttgcagatgaggagctgg

SEQ ID NO: 4824 - RNA, 42 nt, synthetic construct
  misc_feature 1..42: note = Category: MG29-1 sgRNA targeting CD2
  misc_feature 1..42: note = Description: MG29-1-CD2-sgRNA-A10
  source 1..42: mol_type = other RNA
taatttctactgttgtagatttgttgcagatgaggagctgga

SEQ ID NO: 4825 - RNA, 42 nt, synthetic construct
  misc_feature 1..42: note = Category: MG29-1 sgRNA targeting CD2
  misc_feature 1..42: note = Description: MG29-1-CD2-sgRNA-B10
  source 1..42: mol_type = other RNA
taatttctactgttgtagattatcttttttaattagaggaag

SEQ ID NO: 4826 - RNA, 42 nt, synthetic construct
  misc_feature 1..42: note = Category: MG29-1 sgRNA targeting CD2
  misc_feature 1..42: note = Description: MG29-1-CD2-sgRNA-C10
  source 1..42: mol_type = other RNA
taatttctactgttgtagatttaattagaggaaggggacaat

SEQ ID NO: 4827 - RNA, 42 nt, synthetic construct
  misc_feature 1..42: note = Category: MG29-1 sgRNA targeting CD2
  misc_feature 1..42: note = Description: MG29-1-CD2-sgRNA-D10
  source 1..42: mol_type = other RNA
taatttctactgttgtagattaattagaggaaggggacaatg

SEQ ID NO: 4828 - RNA, 42 nt, synthetic construct
  misc_feature 1..42: note = Category: MG29-1 sgRNA targeting CD2
  misc_feature 1..42: note = Description: MG29-1-CD2-sgRNA-E10
  source 1..42: mol_type = other RNA
taatttctactgttgtagataattagaggaaggggacaatga

SEQ ID NO: 4829 - RNA, 42 nt, synthetic construct
  misc_feature 1..42: note = Category: MG29-1 sgRNA targeting CD2
  misc_feature 1..42: note = Description: MG29-1-CD2-sgRNA-F10
  source 1..42: mol_type = other RNA
taatttctactgttgtagatattagaggaaggggacaatgag

SEQ ID NO: 4830 - RNA, 42 nt, synthetic construct
  misc_feature 1..42: note = Category: MG29-1 sgRNA targeting CD2
  misc_feature 1..42: note = Description: MG29-1-CD2-sgRNA-G10
  source 1..42: mol_type = other RNA
taatttctactgttgtagatctgctgccccatggggaggttt

SEQ ID NO: 4831 - RNA, 42 nt, synthetic construct
  misc_feature 1..42: note = Category: MG29-1 sgRNA targeting CD2
  misc_feature 1..42: note = Description: MG29-1-CD2-sgRNA-H10
  source 1..42: mol_type = other RNA
taatttctactgttgtagattgctgccccatggggaggtttt

SEQ ID NO: 4832 - RNA, 42 nt, synthetic construct
  misc_feature 1..42: note = Category: MG29-1 sgRNA targeting CD2
  misc_feature 1..42: note = Description: MG29-1-CD2-sgRNA-A11
  source 1..42: mol_type = other RNA
taatttctactgttgtagatggctgaactcgaggtctgggga

SEQ ID NO: 4833 - RNA, 42 nt, synthetic construct
  misc_feature 1..42: note = Category: MG29-1 sgRNA targeting CD2
  misc_feature 1..42: note = Description: MG29-1-CD2-sgRNA-B11
  source 1..42: mol_type = other RNA
taatttctactgttgtagatgctgaactcgaggtctggggag

SEQ ID NO: 4834 - RNA, 42 nt, synthetic construct
  misc_feature 1..42: note = Category: MG29-1 sgRNA targeting CD2
  misc_feature 1..42: note = Description: MG29-1-CD2-sgRNA-C11
  source 1..42: mol_type = other RNA
taatttctactgttgtagattgctggtgaacttgtgtgcccg

SEQ ID NO: 4835 - RNA, 42 nt, synthetic construct
  misc_feature 1..42: note = Category: MG29-1 sgRNA targeting CD2
  misc_feature 1..42: note = Description: MG29-1-CD2-sgRNA-D11
  source 1..42: mol_type = other RNA
taatttctactgttgtagatgtggggcttccggcccctttct

SEQ ID NO: 4836 - RNA, 42 nt, synthetic construct
  misc_feature 1..42: note = Category: MG29-1 sgRNA targeting CD2
  misc_feature 1..42: note = Description: MG29-1-CD2-sgRNA-E11
  source 1..42: mol_type = other RNA
taatttctactgttgtagatttcagtagctactctgtgggct

SEQ ID NO: 4837 - DNA, 22 bp, unidentified
  misc_feature 1..22: note = Description of Unknown:MG29-1-CD2-target site-A1 sequence
  misc_feature 1..22: note = Category: DNA sequence of CD2 target site
  source 1..22: mol_type = genomic DNA; note = uncultivated organism sequence
catgtaaatttgtagccagctt

SEQ ID NO: 4838 - DNA, 22 bp, unidentified
  misc_feature 1..22: note = Description of Unknown:MG29-1-CD2-target site-B1 sequence
  misc_feature 1..22: note = Category: DNA sequence of CD2 target site
  source 1..22: mol_type = genomic DNA; note = uncultivated organism sequence
tagccagcttccttctgatttt

SEQ ID NO: 4839 - DNA, 22 bp, unidentified
  misc_feature 1..22: note = Description of Unknown:MG29-1-CD2-target site-C1 sequence
  misc_feature 1..22: note = Category: DNA sequence of CD2 target site
  source 1..22: mol_type = genomic DNA; note = uncultivated organism sequence
actcttatgcttacctttggaa

SEQ ID NO: 4840 - DNA, 22 bp, unidentified
  misc_feature 1..22: note = Description of Unknown:MG29-1-CD2-target site-D1 sequence
  misc_feature 1..22: note = Category: DNA sequence of CD2 target site
  source 1..22: mol_type = genomic DNA; note = uncultivated organism sequence
gaagaaacattgaaaatcagaa

SEQ ID NO: 4841 - DNA, 22 bp, unidentified
  misc_feature 1..22: note = Description of Unknown:MG29-1-CD2-target site-E1 sequence
  misc_feature 1..22: note = Category: DNA sequence of CD2 target site
  source 1..22: mol_type = genomic DNA; note = uncultivated organism sequence
gctttttataggtgcagtctcc

SEQ ID NO: 4842 - DNA, 22 bp, unidentified
  misc_feature 1..22: note = Description of Unknown:MG29-1-CD2-target site-F1 sequence
  misc_feature 1..22: note = Category: DNA sequence of CD2 target site
  source 1..22: mol_type = genomic DNA; note = uncultivated organism sequence
ctttttataggtgcagtctcca

SEQ ID NO: 4843 - DNA, 22 bp, unidentified
  misc_feature 1..22: note = Description of Unknown:MG29-1-CD2-target site-G1 sequence
  misc_feature 1..22: note = Category: DNA sequence of CD2 target site
  source 1..22: mol_type = genomic DNA; note = uncultivated organism sequence
tataggtgcagtctccaaagag

SEQ ID NO: 4844 - DNA, 22 bp, unidentified
  misc_feature 1..22: note = Description of Unknown:MG29-1-CD2-target site-H1 sequence
  misc_feature 1..22: note = Category: DNA sequence of CD2 target site
  source 1..22: mol_type = genomic DNA; note = uncultivated organism sequence
ataggtgcagtctccaaagaga

SEQ ID NO: 4845 - DNA, 22 bp, unidentified
  misc_feature 1..22: note = Description of Unknown:MG29-1-CD2-target site-A2 sequence
  misc_feature 1..22: note = Category: DNA sequence of CD2 target site
  source 1..22: mol_type = genomic DNA; note = uncultivated organism sequence
taggtgcagtctccaaagagat

SEQ ID NO: 4846 - DNA, 22 bp, unidentified
  misc_feature 1..22: note = Description of Unknown:MG29-1-CD2-target site-B2 sequence
  misc_feature 1..22: note = Category: DNA sequence of CD2 target site
  source 1..22: mol_type = genomic DNA; note = uncultivated organism sequence
caaatgagtgatgatattgacg

SEQ ID NO: 4847 - DNA, 22 bp, unidentified
  misc_feature 1..22: note = Description of Unknown:MG29-1-CD2-target site-C2 sequence
  misc_feature 1..22: note = Category: DNA sequence of CD2 target site
  source 1..22: mol_type = genomic DNA; note = uncultivated organism sequence
aaatgagtgatgatattgacga

SEQ ID NO: 4848 - DNA, 22 bp, unidentified
  misc_feature 1..22: note = Description of Unknown:MG29-1-CD2-target site-D2 sequence
  misc_feature 1..22: note = Category: DNA sequence of CD2 target site
  source 1..22: mol_type = genomic DNA; note = uncultivated organism sequence
aaggaaaaagatacatataagc

SEQ ID NO: 4849 - DNA, 22 bp, unidentified
  misc_feature 1..22: note = Description of Unknown:MG29-1-CD2-target site-E2 sequence
  misc_feature 1..22: note = Category: DNA sequence of CD2 target site
  source 1..22: mol_type = genomic DNA; note = uncultivated organism sequence
aaaatggaactctgaaaattaa

SEQ ID NO: 4850 - DNA, 22 bp, unidentified
  misc_feature 1..22: note = Description of Unknown:MG29-1-CD2-target site-F2 sequence
  misc_feature 1..22: note = Category: DNA sequence of CD2 target site
  source 1..22: mol_type = genomic DNA; note = uncultivated organism sequence
ttccaacacattttttcctttt

SEQ ID NO: 4851 - DNA, 22 bp, unidentified
  misc_feature 1..22: note = Description of Unknown:MG29-1-CD2-target site-G2 sequence
  misc_feature 1..22: note = Category: DNA sequence of CD2 target site
  source 1..22: mol_type = genomic DNA; note = uncultivated organism sequence
tccaacacattttttccttttg

SEQ ID NO: 4852 - DNA, 22 bp, unidentified
  misc_feature 1..22: note = Description of Unknown:MG29-1-CD2-target site-H2 sequence
  misc_feature 1..22: note = Category: DNA sequence of CD2 target site
  source 1..22: mol_type = genomic DNA; note = uncultivated organism sequence
ccaacacattttttccttttgt

SEQ ID NO: 4853 - DNA, 22 bp, unidentified
  misc_feature 1..22: note = Description of Unknown:MG29-1-CD2-target site-A3 sequence
  misc_feature 1..22: note = Category: DNA sequence of CD2 target site
  source 1..22: mol_type = genomic DNA; note = uncultivated organism sequence
caacacattttttccttttgta

SEQ ID NO: 4854 - DNA, 22 bp, unidentified
  misc_feature 1..22: note = Description of Unknown:MG29-1-CD2-target site-B3 sequence
  misc_feature 1..22: note = Category: DNA sequence of CD2 target site
  source 1..22: mol_type = genomic DNA; note = uncultivated organism sequence
ttccttttgtatcatatattga

SEQ ID NO: 4855 - DNA, 22 bp, unidentified
  misc_feature 1..22: note = Description of Unknown:MG29-1-CD2-target site-C3 sequence
  misc_feature 1..22: note = Category: DNA sequence of CD2 target site
  source 1..22: mol_type = genomic DNA; note = uncultivated organism sequence
tccttttgtatcatatattgat

SEQ ID NO: 4856 - DNA, 22 bp, unidentified
  misc_feature 1..22: note = Description of Unknown:MG29-1-CD2-target site-D3 sequence
  misc_feature 1..22: note = Category: DNA sequence of CD2 target site
  source 1..22: mol_type = genomic DNA; note = uncultivated organism sequence
ccttttgtatcatatattgata

SEQ ID NO: 4857 - DNA, 22 bp, unidentified
  misc_feature 1..22: note = Description of Unknown:MG29-1-CD2-target site-E3 sequence
  misc_feature 1..22: note = Category: DNA sequence of CD2 target site
  source 1..22: mol_type = genomic DNA; note = uncultivated organism sequence
cttttgtatcatatattgatac

SEQ ID NO: 4858 - DNA, 22 bp, unidentified
  misc_feature 1..22: note = Description of Unknown:MG29-1-CD2-target site-F3 sequence
  misc_feature 1..22: note = Category: DNA sequence of CD2 target site
  source 1..22: mol_type = genomic DNA; note = uncultivated organism sequence
gtatcatatattgataccttgt

SEQ ID NO: 4859 - DNA, 22 bp, unidentified
  misc_feature 1..22: note = Description of Unknown:MG29-1-CD2-target site-G3 sequence
  misc_feature 1..22: note = Category: DNA sequence of CD2 target site
  source 1..22: mol_type = genomic DNA; note = uncultivated organism sequence
tatcatatattgataccttgta

SEQ ID NO: 4860 - DNA, 22 bp, unidentified
  misc_feature 1..22: note = Description of Unknown:MG29-1-CD2-target site-H3 sequence
  misc_feature 1..22: note = Category: DNA sequence of CD2 target site
  source 1..22: mol_type = genomic DNA; note = uncultivated organism sequence
cagagttccatttttaaatagc

SEQ ID NO: 4861 - DNA, 22 bp, unidentified
  misc_feature 1..22: note = Description of Unknown:MG29-1-CD2-target site-A4 sequence
  misc_feature 1..22: note = Category: DNA sequence of CD2 target site
  source 1..22: mol_type = genomic DNA; note = uncultivated organism sequence
agagttccatttttaaatagct

SEQ ID NO: 4862 - DNA, 22 bp, unidentified
  misc_feature 1..22: note = Description of Unknown:MG29-1-CD2-target site-B4 sequence
  misc_feature 1..22: note = Category: DNA sequence of CD2 target site
  source 1..22: mol_type = genomic DNA; note = uncultivated organism sequence
taaatagcttatatgtatcttt

SEQ ID NO: 4863 - DNA, 22 bp, unidentified
  misc_feature 1..22: note = Description of Unknown:MG29-1-CD2-target site-C4 sequence
  misc_feature 1..22: note = Category: DNA sequence of CD2 target site
  source 1..22: mol_type = genomic DNA; note = uncultivated organism sequence
aaatagcttatatgtatctttt

SEQ ID NO: 4864 - DNA, 22 bp, unidentified
  misc_feature 1..22: note = Description of Unknown:MG29-1-CD2-target site-D4 sequence
  misc_feature 1..22: note = Category: DNA sequence of CD2 target site
  source 1..22: mol_type = genomic DNA; note = uncultivated organism sequence
aatagcttatatgtatcttttt

SEQ ID NO: 4865 - DNA, 22 bp, unidentified
  misc_feature 1..22: note = Description of Unknown:MG29-1-CD2-target site-E4 sequence
  misc_feature 1..22: note = Category: DNA sequence of CD2 target site
  source 1..22: mol_type = genomic DNA; note = uncultivated organism sequence
tccttgaaagtctctttctctt

SEQ ID NO: 4866 - DNA, 22 bp, unidentified
  misc_feature 1..22: note = Description of Unknown:MG29-1-CD2-target site-F4 sequence
  misc_feature 1..22: note = Category: DNA sequence of CD2 target site
  source 1..22: mol_type = genomic DNA; note = uncultivated organism sequence
ccttgaaagtctctttctcttt

SEQ ID NO: 4867 - DNA, 22 bp, unidentified
  misc_feature 1..22: note = Description of Unknown:MG29-1-CD2-target site-G4 sequence
  misc_feature 1..22: note = Category: DNA sequence of CD2 target site
  source 1..22: mol_type = genomic DNA; note = uncultivated organism sequence
cttgaaagtctctttctctttt

SEQ ID NO: 4868 - DNA, 22 bp, unidentified
  misc_feature 1..22: note = Description of Unknown:MG29-1-CD2-target site-H4 sequence
  misc_feature 1..22: note = Category: DNA sequence of CD2 target site
  source 1..22: mol_type = genomic DNA; note = uncultivated organism sequence
tcttttctgaattgtgcaatct

SEQ ID NO: 4869 - DNA, 22 bp, unidentified
  misc_feature 1..22: note = Description of Unknown:MG29-1-CD2-target site-A5 sequence
  misc_feature 1..22: note = Category: DNA sequence of CD2 target site
  source 1..22: mol_type = genomic DNA; note = uncultivated organism sequence
ctgaattgtgcaatctttttct

SEQ ID NO: 4870 - DNA, 22 bp, unidentified
  misc_feature 1..22: note = Description of Unknown:MG29-1-CD2-target site-B5 sequence
  misc_feature 1..22: note = Category: DNA sequence of CD2 target site
  source 1..22: mol_type = genomic DNA; note = uncultivated organism sequence
tgaattgtgcaatctttttctt

SEQ ID NO: 4871 - DNA, 22 bp, unidentified
  misc_feature 1..22: note = Description of Unknown:MG29-1-CD2-target site-C5 sequence
  misc_feature 1..22: note = Category: DNA sequence of CD2 target site
  source 1..22: mol_type = genomic DNA; note = uncultivated organism sequence
tcttgtctgaagttttttccca

SEQ ID NO: 4872 - DNA, 22 bp, unidentified
  misc_feature 1..22: note = Description of Unknown:MG29-1-CD2-target site-D5 sequence
  misc_feature 1..22: note = Category: DNA sequence of CD2 target site
  source 1..22: mol_type = genomic DNA; note = uncultivated organism sequence
cttgtctgaagttttttcccat

SEQ ID NO: 4873 - DNA, 22 bp, unidentified
  misc_feature 1..22: note = Description of Unknown:MG29-1-CD2-target site-E5 sequence
  misc_feature 1..22: note = Category: DNA sequence of CD2 target site
  source 1..22: mol_type = genomic DNA; note = uncultivated organism sequence
ttgtctgaagttttttcccatt

SEQ ID NO: 4874 - DNA, 22 bp, unidentified
  misc_feature 1..22: note = Description of Unknown:MG29-1-CD2-target site-F5 sequence
  misc_feature 1..22: note = Category: DNA sequence of CD2 target site
  source 1..22: mol_type = genomic DNA; note = uncultivated organism sequence
ttcccattttatatcgtcaata

SEQ ID NO: 4875 - DNA, 22 bp, unidentified
  misc_feature 1..22: note = Description of Unknown:MG29-1-CD2-target site-G5 sequence
  misc_feature 1..22: note = Category: DNA sequence of CD2 target site
  source 1..22: mol_type = genomic DNA; note = uncultivated organism sequence
tcccattttatatcgtcaatat

SEQ ID NO: 4876 - DNA, 22 bp, unidentified
  misc_feature 1..22: note = Description of Unknown:MG29-1-CD2-target site-H5 sequence
  misc_feature 1..22: note = Category: DNA sequence of CD2 target site
  source 1..22: mol_type = genomic DNA; note = uncultivated organism sequence
cccattttatatcgtcaatatc

SEQ ID NO: 4877 - DNA, 22 bp, unidentified
  misc_feature 1..22: note = Description of Unknown:MG29-1-CD2-target site-A6 sequence
  misc_feature 1..22: note = Category: DNA sequence of CD2 target site
  source 1..22: mol_type = genomic DNA; note = uncultivated organism sequence
ccattttatatcgtcaatatca

SEQ ID NO: 4878 - DNA, 22 bp, unidentified
  misc_feature 1..22: note = Description of Unknown:MG29-1-CD2-target site-B6 sequence
  misc_feature 1..22: note = Category: DNA sequence of CD2 target site
  source 1..22: mol_type = genomic DNA; note = uncultivated organism sequence
atatcgtcaatatcatcactca

SEQ ID NO: 4879 - DNA, 22 bp, unidentified
  misc_feature 1..22: note = Description of Unknown:MG29-1-CD2-target site-C6 sequence
  misc_feature 1..22: note = Category: DNA sequence of CD2 target site
  source 1..22: mol_type = genomic DNA; note = uncultivated organism sequence
tatcgtcaatatcatcactcat

SEQ ID NO: 4880 - DNA, 22 bp, unidentified
  misc_feature 1..22: note = Description of Unknown:MG29-1-CD2-target site-D6 sequence
  misc_feature 1..22: note = Category: DNA sequence of CD2 target site
  source 1..22: mol_type = genomic DNA; note = uncultivated organism sequence
aaaactaggaatgtccaagttg

SEQ ID NO: 4881 - DNA, 22 bp, unidentified
  misc_feature 1..22: note = Description of Unknown:MG29-1-CD2-target site-E6 sequence
  misc_feature 1..22: note = Category: DNA sequence of CD2 target site
  source 1..22: mol_type = genomic DNA; note = uncultivated organism sequence
caaggcattcgtaatctctttg

SEQ ID NO: 4882 - DNA, 22 bp, unidentified
  misc_feature 1..22: note = Description of Unknown:MG29-1-CD2-target site-F6 sequence
  misc_feature 1..22: note = Category: DNA sequence of CD2 target site
  source 1..22: mol_type = genomic DNA; note = uncultivated organism sequence
ctttctttttagagagggtctc

SEQ ID NO: 4883 - DNA, 22 bp, unidentified
  misc_feature 1..22: note = Description of Unknown:MG29-1-CD2-target site-G6 sequence
  misc_feature 1..22: note = Category: DNA sequence of CD2 target site
  source 1..22: mol_type = genomic DNA; note = uncultivated organism sequence
tttttagagagggtctcaaaac

SEQ ID NO: 4884 - DNA, 22 bp, unidentified
  misc_feature 1..22: note = Description of Unknown:MG29-1-CD2-target site-H6 sequence
  misc_feature 1..22: note = Category: DNA sequence of CD2 target site
  source 1..22: mol_type = genomic DNA; note = uncultivated organism sequence
tagagagggtctcaaaaccaaa

SEQ ID NO: 4885 - DNA, 22 bp, unidentified
  misc_feature 1..22: note = Description of Unknown:MG29-1-CD2-target site-A7 sequence
  misc_feature 1..22: note = Category: DNA sequence of CD2 target site
  source 1..22: mol_type = genomic DNA; note = uncultivated organism sequence
agagagggtctcaaaaccaaag

SEQ ID NO: 4886 - DNA, 22 bp, unidentified
  misc_feature 1..22: note = Description of Unknown:MG29-1-CD2-target site-B7 sequence
  misc_feature 1..22: note = Category: DNA sequence of CD2 target site
  source 1..22: mol_type = genomic DNA; note = uncultivated organism sequence
gagagggtctcaaaaccaaaga

SEQ ID NO: 4887 - DNA, 22 bp, unidentified
  misc_feature 1..22: note = Description of Unknown:MG29-1-CD2-target site-C7 sequence
  misc_feature 1..22: note = Category: DNA sequence of CD2 target site
  source 1..22: mol_type = genomic DNA; note = uncultivated organism sequence
tcagagggtcatcacacacaag

SEQ ID NO: 4888 - DNA, 22 bp, unidentified
  misc_feature 1..22: note = Description of Unknown:MG29-1-CD2-target site-D7 sequence
  misc_feature 1..22: note = Category: DNA sequence of CD2 target site
  source 1..22: mol_type = genomic DNA; note = uncultivated organism sequence
ttccctgctgtgcacttgaatt

SEQ ID NO: 4889 - DNA, 22 bp, unidentified
  misc_feature 1..22: note = Description of Unknown:MG29-1-CD2-target site-E7 sequence
  misc_feature 1..22: note = Category: DNA sequence of CD2 target site
  source 1..22: mol_type = genomic DNA; note = uncultivated organism sequence
gcactcaggctggtggtccact

SEQ ID NO: 4890 - DNA, 22 bp, unidentified
  misc_feature 1..22: note = Description of Unknown:MG29-1-CD2-target site-F7 sequence
  misc_feature 1..22: note = Category: DNA sequence of CD2 target site
  source 1..22: mol_type = genomic DNA; note = uncultivated organism sequence
cactcaggctggtggtccactt

SEQ ID NO: 4891 - DNA, 22 bp, unidentified
  misc_feature 1..22: note = Description of Unknown:MG29-1-CD2-target site-G7 sequence
  misc_feature 1..22: note = Category: DNA sequence of CD2 target site
  source 1..22: mol_type = genomic DNA; note = uncultivated organism sequence
agatgtttcccatcttgataca

SEQ ID NO: 4892 - DNA, 22 bp, unidentified
  misc_feature 1..22: note = Description of Unknown:MG29-1-CD2-target site-H7 sequence
  misc_feature 1..22: note = Category: DNA sequence of CD2 target site
  source 1..22: mol_type = genomic DNA; note = uncultivated organism sequence
gatgtttcccatcttgatacag

SEQ ID NO: 4893 - DNA, 22 bp, unidentified
  misc_feature 1..22: note = Description of Unknown:MG29-1-CD2-target site-A8 sequence
  misc_feature 1..22: note = Category: DNA sequence of CD2 target site
  source 1..22: mol_type = genomic DNA; note = uncultivated organism sequence
ccatcttgatacaggtttaatt

SEQ ID NO: 4894 - DNA, 22 bp, unidentified
  misc_feature 1..22: note = Description of Unknown:MG29-1-CD2-target site-B8 sequence
  misc_feature 1..22: note = Category: DNA sequence of CD2 target site
  source 1..22: mol_type = genomic DNA; note = uncultivated organism sequence
attcggggtcagttccattcat

SEQ ID NO: 4895 - DNA, 22 bp, unidentified
  misc_feature 1..22: note = Description of Unknown:MG29-1-CD2-target site-C8 sequence
  misc_feature 1..22: note = Category: DNA sequence of CD2 target site
  source 1..22: mol_type = genomic DNA; note = uncultivated organism sequence
ccatcttgatacaggtttaatt

SEQ ID NO: 4896 - DNA, 22 bp, unidentified
  misc_feature 1..22: note = Description of Unknown:MG29-1-CD2-target site-D8 sequence
  misc_feature 1..22: note = Category: DNA sequence of CD2 target site
  source 1..22: mol_type = genomic DNA; note = uncultivated organism sequence
cagagaaaggtctggacatcta

SEQ ID NO: 4897 - DNA, 22 bp, unidentified
  misc_feature 1..22: note = Description of Unknown:MG29-1-CD2-target site-E8 sequence
  misc_feature 1..22: note = Category: DNA sequence of CD2 target site
  source 1..22: mol_type = genomic DNA; note = uncultivated organism sequence
tggcactgctcgttttctatat

SEQ ID NO: 4898 - DNA, 22 bp, unidentified
  misc_feature 1..22: note = Description of Unknown:MG29-1-CD2-target site-F8 sequence
  misc_feature 1..22: note = Category: DNA sequence of CD2 target site
  source 1..22: mol_type = genomic DNA; note = uncultivated organism sequence
ctatatcaccaaaaggaaaaaa

SEQ ID NO: 4899 - DNA, 22 bp, unidentified
  misc_feature 1..22: note = Description of Unknown:MG29-1-CD2-target site-G8 sequence
  misc_feature 1..22: note = Category: DNA sequence of CD2 target site
  source 1..22: mol_type = genomic DNA; note = uncultivated organism sequence
tatatcaccaaaaggaaaaaac

SEQ ID NO: 4900 - DNA, 22 bp, unidentified
  misc_feature 1..22: note = Description of Unknown:MG29-1-CD2-target site-H8 sequence
  misc_feature 1..22: note = Category: DNA sequence of CD2 target site
  source 1..22: mol_type = genomic DNA; note = uncultivated organism sequence
tccgactcctctgttttttcct

SEQ ID NO: 4901 - DNA, 22 bp, unidentified
  misc_feature 1..22: note = Description of Unknown:MG29-1-CD2-target site-A9 sequence
  misc_feature 1..22: note = Category: DNA sequence of CD2 target site
  source 1..22: mol_type = genomic DNA; note = uncultivated organism sequence
ttccttttggtgatatagaaaa

SEQ ID NO: 4902 - DNA, 22 bp, unidentified
  misc_feature 1..22: note = Description of Unknown:MG29-1-CD2-target site-B9 sequence
  misc_feature 1..22: note = Category: DNA sequence of CD2 target site
  source 1..22: mol_type = genomic DNA; note = uncultivated organism sequence
tccttttggtgatatagaaaac

SEQ ID NO: 4903 - DNA, 22 bp, unidentified
  misc_feature 1..22: note = Description of Unknown:MG29-1-CD2-target site-C9 sequence
  misc_feature 1..22: note = Category: DNA sequence of CD2 target site
  source 1..22: mol_type = genomic DNA; note = uncultivated organism sequence
ccttttggtgatatagaaaacg

SEQ ID NO: 4904 - DNA, 22 bp, unidentified
  misc_feature 1..22: note = Description of Unknown:MG29-1-CD2-target site-D9 sequence
  misc_feature 1..22: note = Category: DNA sequence of CD2 target site
  source 1..22: mol_type = genomic DNA; note = uncultivated organism sequence
cttttggtgatatagaaaacga

SEQ ID NO: 4905 - DNA, 22 bp, unidentified
  misc_feature 1..22: note = Description of Unknown:MG29-1-CD2-target site-E9 sequence
  misc_feature 1..22: note = Category: DNA sequence of CD2 target site
  source 1..22: mol_type = genomic DNA; note = uncultivated organism sequence
ggtgatatagaaaacgagcagt

SEQ ID NO: 4906 - DNA, 22 bp, unidentified
  misc_feature 1..22: note = Description of Unknown:MG29-1-CD2-target site-F9 sequence
  misc_feature 1..22: note = Category: DNA sequence of CD2 target site
  source 1..22: mol_type = genomic DNA; note = uncultivated organism sequence
gtgatatagaaaacgagcagtg

SEQ ID NO: 4907 - DNA, 22 bp, unidentified
  misc_feature 1..22: note = Description of Unknown:MG29-1-CD2-target site-G9 sequence
  misc_feature 1..22: note = Category: DNA sequence of CD2 target site
  source 1..22: mol_type = genomic DNA; note = uncultivated organism sequence
tctgcaaaaggaagagaagtgg

SEQ ID NO: 4908 - DNA, 22 bp, unidentified
  misc_feature 1..22: note = Description of Unknown:MG29-1-CD2-target site-H9 sequence
  misc_feature 1..22: note = Category: DNA sequence of CD2 target site
  source 1..22: mol_type = genomic DNA; note = uncultivated organism sequence
gttgttgcagatgaggagctgg

SEQ ID NO: 4909 - DNA, 22 bp, unidentified
  misc_feature 1..22: note = Description of Unknown:MG29-1-CD2-target site-A10 sequence
  misc_feature 1..22: note = Category: DNA sequence of CD2 target site
  source 1..22: mol_type = genomic DNA; note = uncultivated organism sequence
ttgttgcagatgaggagctgga

SEQ ID NO: 4910 - DNA, 22 bp, unidentified
  misc_feature 1..22: note = Description of Unknown:MG29-1-CD2-target site-B10 sequence
  misc_feature 1..22: note = Category: DNA sequence of CD2 target site
  source 1..22: mol_type = genomic DNA; note = uncultivated organism sequence
tatcttttttaattagaggaag

SEQ ID NO: 4911 - DNA, 22 bp, unidentified
  misc_feature 1..22: note = Description of Unknown:MG29-1-CD2-target site-C10 sequence
  misc_feature 1..22: note = Category: DNA sequence of CD2 target site
  source 1..22: mol_type = genomic DNA; note = uncultivated organism sequence
ttaattagaggaaggggacaat

SEQ ID NO: 4912 - DNA, 22 bp, unidentified
  misc_feature 1..22: note = Description of Unknown:MG29-1-CD2-target site-D10 sequence
  misc_feature 1..22: note = Category: DNA sequence of CD2 target site
  source 1..22: mol_type = genomic DNA; note = uncultivated organism sequence
taattagaggaaggggacaatg

SEQ ID NO: 4913 - DNA, 22 bp, unidentified
  misc_feature 1..22: note = Description of Unknown:MG29-1-CD2-target site-E10 sequence
  misc_feature 1..22: note = Category: DNA sequence of CD2 target site
  source 1..22: mol_type = genomic DNA; note = uncultivated organism sequence
aattagaggaaggggacaatga

SEQ ID NO: 4914 - DNA, 22 bp, unidentified
  misc_feature 1..22: note = Description of Unknown:MG29-1-CD2-target site-F10 sequence
  misc_feature 1..22: note = Category: DNA sequence of CD2 target site
  source 1..22: mol_type = genomic DNA; note = uncultivated organism sequence
attagaggaaggggacaatgag

SEQ ID NO: 4915 - DNA, 22 bp, unidentified
  misc_feature 1..22: note = Description of Unknown:MG29-1-CD2-target site-G10 sequence
  misc_feature 1..22: note = Category: DNA sequence of CD2 target site
  source 1..22: mol_type = genomic DNA; note = uncultivated organism sequence
ctgctgccccatggggaggttt

SEQ ID NO: 4916 - DNA, 22 bp, unidentified
  misc_feature 1..22: note = Description of Unknown:MG29-1-CD2-target site-H10 sequence
  misc_feature 1..22: note = Category: DNA sequence of CD2 target site
  source 1..22: mol_type = genomic DNA; note = uncultivated organism sequence
tgctgccccatggggaggtttt

SEQ ID NO: 4917 - DNA, 22 bp, unidentified
  misc_feature 1..22: note = Description of Unknown:MG29-1-CD2-target site-A11 sequence
  misc_feature 1..22: note = Category: DNA sequence of CD2 target site
  source 1..22: mol_type = genomic DNA; note = uncultivated organism sequence
ggctgaactcgaggtctgggga

SEQ ID NO: 4918 - DNA, 22 bp, unidentified
  misc_feature 1..22: note = Description of Unknown:MG29-1-CD2-target site-B11 sequence
  misc_feature 1..22: note = Category: DNA sequence of CD2 target site
  source 1..22: mol_type = genomic DNA; note = uncultivated organism sequence
gctgaactcgaggtctggggag

SEQ ID NO: 4919 - DNA, 22 bp, unidentified
  misc_feature 1..22: note = Description of Unknown:MG29-1-CD2-target site-C11 sequence
  misc_feature 1..22: note = Category: DNA sequence of CD2 target site
  source 1..22: mol_type = genomic DNA; note = uncultivated organism sequence
tgctggtgaacttgtgtgcccg

SEQ ID NO: 4920 - DNA, 22 bp, unidentified
  misc_feature 1..22: note = Description of Unknown:MG29-1-CD2-target site-D11 sequence
  misc_feature 1..22: note = Category: DNA sequence of CD2 target site
  source 1..22: mol_type = genomic DNA; note = uncultivated organism sequence
gtggggcttccggcccctttct

SEQ ID NO: 4921 - DNA, 22 bp, unidentified
  misc_feature 1..22: note = Description of Unknown:MG29-1-CD2-target site-E11 sequence
  misc_feature 1..22: note = Category: DNA sequence of CD2 target site
  source 1..22: mol_type = genomic DNA; note = uncultivated organism sequence
ttcagtagctactctgtgggct

SEQ ID NO: 4922 - RNA, 42 nt, synthetic construct
  misc_feature 1..42: note = Category: MG29-1 sgRNA targeting CD5
  misc_feature 1..42: note = Description: MG29-1-CD5-sgRNA-A1
  source 1..42: mol_type = other RNA
taatttctactgttgtagattgcagtcgcttcctgcctcgga

SEQ ID NO: 4923 - RNA, 42 nt, synthetic construct
  misc_feature 1..42: note = Category: MG29-1 sgRNA targeting CD5
  misc_feature 1..42: note = Description: MG29-1-CD5-sgRNA-B1
  source 1..42: mol_type = other RNA
taatttctactgttgtagattccatgtggctcttccttacct

SEQ ID NO: 4924 - RNA, 42 nt, synthetic construct
  misc_feature 1..42: note = Category: MG29-1 sgRNA targeting CD5
  misc_feature 1..42: note = Description: MG29-1-CD5-sgRNA-C1
  source 1..42: mol_type = other RNA
taatttctactgttgtagattgacccccagatttccaggcaa

SEQ ID NO: 4925 - RNA, 42 nt, synthetic construct
  misc_feature 1..42: note = Category: MG29-1 sgRNA targeting CD5
  misc_feature 1..42: note = Description: MG29-1-CD5-sgRNA-D1
  source 1..42: mol_type = other RNA
taatttctactgttgtagatcaggcaaggctcacccgttcca

SEQ ID NO: 4926 - RNA, 42 nt, synthetic construct
  misc_feature 1..42: note = Category: MG29-1 sgRNA targeting CD5
  misc_feature 1..42: note = Description: MG29-1-CD5-sgRNA-E1
  source 1..42: mol_type = other RNA
taatttctactgttgtagatcagccagagctggggccggagc

SEQ ID NO: 4927 - RNA, 42 nt, synthetic construct
  misc_feature 1..42: note = Category: MG29-1 sgRNA targeting CD5
  misc_feature 1..42: note = Description: MG29-1-CD5-sgRNA-F1
  source 1..42: mol_type = other RNA
taatttctactgttgtagattgctgtggctgcagttggagaa

SEQ ID NO: 4928 - RNA, 42 nt, synthetic construct
  misc_feature 1..42: note = Category: MG29-1 sgRNA targeting CD5
  misc_feature 1..42: note = Description: MG29-1-CD5-sgRNA-G1
  source 1..42: mol_type = other RNA
taatttctactgttgtagatgacgcttgactggggtcctccc

SEQ ID NO: 4929 - RNA, 42 nt, synthetic construct
  misc_feature 1..42: note = Category: MG29-1 sgRNA targeting CD5
  misc_feature 1..42: note = Description: MG29-1-CD5-sgRNA-H1
  source 1..42: mol_type = other RNA
taatttctactgttgtagatacgcttgactggggtcctccca

SEQ ID NO: 4930 - RNA, 42 nt, synthetic construct
  misc_feature 1..42: note = Category: MG29-1 sgRNA targeting CD5
  misc_feature 1..42: note = Description: MG29-1-CD5-sgRNA-A2
  source 1..42: mol_type = other RNA
taatttctactgttgtagatctggggcttgattttcctgaag

SEQ ID NO: 4931 - RNA, 42 nt, synthetic construct
  misc_feature 1..42: note = Category: MG29-1 sgRNA targeting CD5
  misc_feature 1..42: note = Description: MG29-1-CD5-sgRNA-B2
  source 1..42: mol_type = other RNA
taatttctactgttgtagattggggcttgattttcctgaagc

SEQ ID NO: 4932 - RNA, 42 nt, synthetic construct
  misc_feature 1..42: note = Category: MG29-1 sgRNA targeting CD5
  misc_feature 1..42: note = Description: MG29-1-CD5-sgRNA-C2
  source 1..42: mol_type = other RNA
taatttctactgttgtagatcctgaagcaatgctccagggag

SEQ ID NO: 4933 - RNA, 42 nt, synthetic construct
  misc_feature 1..42: note = Category: MG29-1 sgRNA targeting CD5
  misc_feature 1..42: note = Description: MG29-1-CD5-sgRNA-D2
  source 1..42: mol_type = other RNA
taatttctactgttgtagatctgaagcaatgctccagggagg

SEQ ID NO: 4934 - RNA, 42 nt, synthetic construct
  misc_feature 1..42: note = Category: MG29-1 sgRNA targeting CD5
  misc_feature 1..42: note = Description: MG29-1-CD5-sgRNA-E2
  source 1..42: mol_type = other RNA
taatttctactgttgtagatccattgcttcccctctcaggtt

SEQ ID NO: 4935 - RNA, 42 nt, synthetic construct
  misc_feature 1..42: note = Category: MG29-1 sgRNA targeting CD5
  misc_feature 1..42: note = Description: MG29-1-CD5-sgRNA-F2
  source 1..42: mol_type = other RNA
taatttctactgttgtagatcagcccaaggtgcagagccgtc

SEQ ID NO: 4936 - RNA, 42 nt, synthetic construct
  misc_feature 1..42: note = Category: MG29-1 sgRNA targeting CD5
  misc_feature 1..42: note = Description: MG29-1-CD5-sgRNA-G2
  source 1..42: mol_type = other RNA
taatttctactgttgtagatggagagaaattcctactgcaag

SEQ ID NO: 4937 - RNA, 42 nt, synthetic construct
  misc_feature 1..42: note = Category: MG29-1 sgRNA targeting CD5
  misc_feature 1..42: note = Description: MG29-1-CD5-sgRNA-H2
  source 1..42: mol_type = other RNA
taatttctactgttgtagattctcccaaagttcgtggcactg

SEQ ID NO: 4938 - RNA, 42 nt, synthetic construct
  misc_feature 1..42: note = Category: MG29-1 sgRNA targeting CD5
  misc_feature 1..42: note = Description: MG29-1-CD5-sgRNA-A3
  source 1..42: mol_type = other RNA
taatttctactgttgtagatttcactagcttcttgtaggcaa

SEQ ID NO: 4939 - RNA, 42 nt, synthetic construct
  misc_feature 1..42: note = Category: MG29-1 sgRNA targeting CD5
  misc_feature 1..42: note = Description: MG29-1-CD5-sgRNA-B3
  source 1..42: mol_type = other RNA
taatttctactgttgtagatttgtctcttgcccagtccgcca

SEQ ID NO: 4940 - RNA, 42 nt, synthetic construct
  misc_feature 1..42: note = Category: MG29-1 sgRNA targeting CD5
  misc_feature 1..42: note = Description: MG29-1-CD5-sgRNA-C3
  source 1..42: mol_type = other RNA
taatttctactgttgtagatggttcattcccgttgggccaat

SEQ ID NO: 4941 - RNA, 42 nt, synthetic construct
  misc_feature 1..42: note = Category: MG29-1 sgRNA targeting CD5
  misc_feature 1..42: note = Description: MG29-1-CD5-sgRNA-D3
  source 1..42: mol_type = other RNA
taatttctactgttgtagatgttcattcccgttgggccaatc

SEQ ID NO: 4942 - RNA, 42 nt, synthetic construct
  misc_feature 1..42: note = Category: MG29-1 sgRNA targeting CD5
  misc_feature 1..42: note = Description: MG29-1-CD5-sgRNA-E3
  source 1..42: mol_type = other RNA
taatttctactgttgtagatcatcgcaaccacacggcaaccg

SEQ ID NO: 4943 - RNA, 42 nt, synthetic construct
  misc_feature 1..42: note = Category: MG29-1 sgRNA targeting CD5
  misc_feature 1..42: note = Description: MG29-1-CD5-sgRNA-F3
  source 1..42: mol_type = other RNA
taatttctactgttgtagattttccccagctctggaaggggc

SEQ ID NO: 4944 - RNA, 42 nt, synthetic construct
  misc_feature 1..42: note = Category: MG29-1 sgRNA targeting CD5
  misc_feature 1..42: note = Description: MG29-1-CD5-sgRNA-G3
  source 1..42: mol_type = other RNA
taatttctactgttgtagatcccagctctggaaggggctctg

SEQ ID NO: 4945 - RNA, 42 nt, synthetic construct
  misc_feature 1..42: note = Category: MG29-1 sgRNA targeting CD5
  misc_feature 1..42: note = Description: MG29-1-CD5-sgRNA-H3
  source 1..42: mol_type = other RNA
taatttctactgttgtagatcagcctctgagccccatgcaga

SEQ ID NO: 4946 - DNA, 22 bp, unidentified
  misc_feature 1..22: note = Description of Unknown:MG29-1-CD5-target site-A1 sequence
  misc_feature 1..22: note = Category: DNA sequence of CD5 target site
  source 1..22: mol_type = genomic DNA; note = uncultivated organism sequence
tgcagtcgcttcctgcctcgga

SEQ ID NO: 4947 - DNA, 22 bp, unidentified
  misc_feature 1..22: note = Description of Unknown:MG29-1-CD5-target site-B1 sequence
  misc_feature 1..22: note = Category: DNA sequence of CD5 target site
  source 1..22: mol_type = genomic DNA; note = uncultivated organism sequence
tccatgtggctcttccttacct

SEQ ID NO: 4948 - DNA, 22 bp, unidentified
  misc_feature 1..22: note = Description of Unknown:MG29-1-CD5-target site-C1 sequence
  misc_feature 1..22: note = Category: DNA sequence of CD5 target site
  source 1..22: mol_type = genomic DNA; note = uncultivated organism sequence
tgacccccagatttccaggcaa

SEQ ID NO: 4949 - DNA, 22 bp, unidentified
  misc_feature 1..22: note = Description of Unknown:MG29-1-CD5-target site-D1 sequence
  misc_feature 1..22: note = Category: DNA sequence of CD5 target site
  source 1..22: mol_type = genomic DNA; note = uncultivated organism sequence
caggcaaggctcacccgttcca

SEQ ID NO: 4950 - DNA, 22 bp, unidentified
  misc_feature 1..22: note = Description of Unknown:MG29-1-CD5-target site-E1 sequence
  misc_feature 1..22: note = Category: DNA sequence of CD5 target site
  source 1..22: mol_type = genomic DNA; note = uncultivated organism sequence
cagccagagctggggccggagc

SEQ ID NO: 4951 - DNA, 22 bp, unidentified
  misc_feature 1..22: note = Description of Unknown:MG29-1-CD5-target site-F1 sequence
  misc_feature 1..22: note = Category: DNA sequence of CD5 target site
  source 1..22: mol_type = genomic DNA; note = uncultivated organism sequence
tgctgtggctgcagttggagaa

SEQ ID NO: 4952 - DNA, 22 bp, unidentified
  misc_feature 1..22: note = Description of Unknown:MG29-1-CD5-target site-G1 sequence
  misc_feature 1..22: note = Category: DNA sequence of CD5 target site
  source 1..22: mol_type = genomic DNA; note = uncultivated organism sequence
gacgcttgactggggtcctccc

SEQ ID NO: 4953 - DNA, 22 bp, unidentified
  misc_feature 1..22: note = Description of Unknown:MG29-1-CD5-target site-H1 sequence
  misc_feature 1..22: note = Category: DNA sequence of CD5 target site
  source 1..22: mol_type = genomic DNA; note = uncultivated organism sequence
acgcttgactggggtcctccca

SEQ ID NO: 4954 - DNA, 22 bp, unidentified
  misc_feature 1..22: note = Description of Unknown:MG29-1-CD5-target site-A2 sequence
  misc_feature 1..22: note = Category: DNA sequence of CD5 target site
  source 1..22: mol_type = genomic DNA; note = uncultivated organism sequence
ctggggcttgattttcctgaag

SEQ ID NO: 4955 - DNA, 22 bp, unidentified
  misc_feature 1..22: note = Description of Unknown:MG29-1-CD5-target site-B2 sequence
  misc_feature 1..22: note = Category: DNA sequence of CD5 target site
  source 1..22: mol_type = genomic DNA; note = uncultivated organism sequence
tggggcttgattttcctgaagc

SEQ ID NO: 4956 - DNA, 22 bp, unidentified
  misc_feature 1..22: note = Description of Unknown:MG29-1-CD5-target site-C2 sequence
  misc_feature 1..22: note = Category: DNA sequence of CD5 target site
  source 1..22: mol_type = genomic DNA; note = uncultivated organism sequence
cctgaagcaatgctccagggag

SEQ ID NO: 4957 - DNA, 22 bp, unidentified
  misc_feature 1..22: note = Description of Unknown:MG29-1-CD5-target site-D2 sequence
  misc_feature 1..22: note = Category: DNA sequence of CD5 target site
  source 1..22: mol_type = genomic DNA; note = uncultivated organism sequence
ctgaagcaatgctccagggagg

SEQ ID NO: 4958 - DNA, 22 bp, unidentified
  misc_feature 1..22: note = Description of Unknown:MG29-1-CD5-target site-E2 sequence
  misc_feature 1..22: note = Category: DNA sequence of CD5 target site
  source 1..22: mol_type = genomic DNA; note = uncultivated organism sequence
ccattgcttcccctctcaggtt

SEQ ID NO: 4959 - DNA, 22 bp, unidentified
  misc_feature 1..22: note = Description of Unknown:MG29-1-CD5-target site-F2 sequence
  misc_feature 1..22: note = Category: DNA sequence of CD5 target site
  source 1..22: mol_type = genomic DNA; note = uncultivated organism sequence
cagcccaaggtgcagagccgtc

SEQ ID NO: 4960 - DNA, 22 bp, unidentified
  misc_feature 1..22: note = Description of Unknown:MG29-1-CD5-target site-G2 sequence
  misc_feature 1..22: note = Category: DNA sequence of CD5 target site
  source 1..22: mol_type = genomic DNA; note = uncultivated organism sequence
ggagagaaattcctactgcaag

SEQ ID NO: 4961 - DNA, 22 bp, unidentified
  misc_feature 1..22: note = Description of Unknown:MG29-1-CD5-target site-H2 sequence
  misc_feature 1..22: note = Category: DNA sequence of CD5 target site
  source 1..22: mol_type = genomic DNA; note = uncultivated organism sequence
tctcccaaagttcgtggcactg

SEQ ID NO: 4962 - DNA, 22 bp, unidentified
  misc_feature 1..22: note = Description of Unknown:MG29-1-CD5-target site-A3 sequence
  misc_feature 1..22: note = Category: DNA sequence of CD5 target site
  source 1..22: mol_type = genomic DNA; note = uncultivated organism sequence
ttcactagcttcttgtaggcaa

SEQ ID NO: 4963 - DNA, 22 bp, unidentified
  misc_feature 1..22: note = Description of Unknown:MG29-1-CD5-target site-B3 sequence
  misc_feature 1..22: note = Category: DNA sequence of CD5 target site
  source 1..22: mol_type = genomic DNA; note = uncultivated organism sequence
ttgtctcttgcccagtccgcca

SEQ ID NO: 4964 - DNA, 22 bp, unidentified
  misc_feature 1..22: note = Description of Unknown:MG29-1-CD5-target site-C3 sequence
  misc_feature 1..22: note = Category: DNA sequence of CD5 target site
  source 1..22: mol_type = genomic DNA; note = uncultivated organism sequence
ggttcattcccgttgggccaat

SEQ ID NO: 4965 - DNA, 22 bp, unidentified
  misc_feature 1..22: note = Description of Unknown:MG29-1-CD5-target site-D3 sequence
  misc_feature 1..22: note = Category: DNA sequence of CD5 target site
  source 1..22: mol_type = genomic DNA; note = uncultivated organism sequence
gttcattcccgttgggccaatc

SEQ ID NO: 4966 - DNA, 22 bp, unidentified
  misc_feature 1..22: note = Description of Unknown:MG29-1-CD5-target site-E3 sequence
  misc_feature 1..22: note = Category: DNA sequence of CD5 target site
  source 1..22: mol_type = genomic DNA; note = uncultivated organism sequence
catcgcaaccacacggcaaccg

SEQ ID NO: 4967 - DNA, 22 bp, unidentified
  misc_feature 1..22: note = Description of Unknown:MG29-1-CD5-target site-F3 sequence
  misc_feature 1..22: note = Category: DNA sequence of CD5 target site
  source 1..22: mol_type = genomic DNA; note = uncultivated organism sequence
tttccccagctctggaaggggc

SEQ ID NO: 4968 - DNA, 22 bp, unidentified
  misc_feature 1..22: note = Description of Unknown:MG29-1-CD5-target site-G3 sequence
  misc_feature 1..22: note = Category: DNA sequence of CD5 target site
  source 1..22: mol_type = genomic DNA; note = uncultivated organism sequence
cccagctctggaaggggctctg

SEQ ID NO: 4969 - DNA, 22 bp, unidentified
  misc_feature 1..22: note = Description of Unknown:MG29-1-CD5-target site-H3 sequence
  misc_feature 1..22: note = Category: DNA sequence of CD5 target site
  source 1..22: mol_type = genomic DNA; note = uncultivated organism sequence
cagcctctgagccccatgcaga

SEQ ID NO: 4970 - RNA, 42 nt, synthetic construct
  misc_feature 1..42: note = Category: MG29-1 sgRNA targeting hRosa26
  misc_feature 1..42: note = Description: MG29-1-hRosa26-sgRNA-A1
  source 1..42: mol_type = other RNA
taatttctactgttgtagataggtcactgtcctagctctcca

SEQ ID NO: 4971 - RNA, 42 nt, synthetic construct
  misc_feature 1..42: note = Category: MG29-1 sgRNA targeting hRosa26
  misc_feature 1..42: note = Description: MG29-1-hRosa26-sgRNA-B1
  source 1..42: mol_type = other RNA
taatttctactgttgtagattttttaggccgggcgcggtggc

SEQ ID NO: 4972 - RNA, 42 nt, synthetic construct
  misc_feature 1..42: note = Category: MG29-1 sgRNA targeting hRosa26
  misc_feature 1..42: note = Description: MG29-1-hRosa26-sgRNA-C1
  source 1..42: mol_type = other RNA
taatttctactgttgtagattaggccgggcgcggtggctcac

SEQ ID NO: 4973 - RNA, 42 nt, synthetic construct
  misc_feature 1..42: note = Category: MG29-1 sgRNA targeting hRosa26
  misc_feature 1..42: note = Description: MG29-1-hRosa26-sgRNA-D1
  source 1..42: mol_type = other RNA
taatttctactgttgtagataggccgggcgcggtggctcaca

SEQ ID NO: 4974 - RNA, 42 nt, synthetic construct
  misc_feature 1..42: note = Category: MG29-1 sgRNA targeting hRosa26
  misc_feature 1..42: note = Description: MG29-1-hRosa26-sgRNA-E1
  source 1..42: mol_type = other RNA
taatttctactgttgtagatggccgggcgcggtggctcacac

SEQ ID NO: 4975 - RNA, 42 nt, synthetic construct
  misc_feature 1..42: note = Category: MG29-1 sgRNA targeting hRosa26
  misc_feature 1..42: note = Description: MG29-1-hRosa26-sgRNA-F1
  source 1..42: mol_type = other RNA
taatttctactgttgtagatggaggccgaggcaggcagatca

SEQ ID NO: 4976 - RNA, 42 nt, synthetic construct
  misc_feature 1..42: note = Category: MG29-1 sgRNA targeting hRosa26
  misc_feature 1..42: note = Description: MG29-1-hRosa26-sgRNA-G1
  source 1..42: mol_type = other RNA
taatttctactgttgtagataggtcaggagttcaagaccagc

SEQ ID NO: 4977 - RNA, 42 nt, synthetic construct
  misc_feature 1..42: note = Category: MG29-1 sgRNA targeting hRosa26
  misc_feature 1..42: note = Description: MG29-1-hRosa26-sgRNA-H1
  source 1..42: mol_type = other RNA
taatttctactgttgtagatcagtgagctgagatcgtgccat

SEQ ID NO: 4978 - RNA, 42 nt, synthetic construct
  misc_feature 1..42: note = Category: MG29-1 sgRNA targeting hRosa26
  misc_feature 1..42: note = Description: MG29-1-hRosa26-sgRNA-A2
  source 1..42: mol_type = other RNA
taatttctactgttgtagatttttttggttgggtgtggtggc

SEQ ID NO: 4979 - RNA, 42 nt, synthetic construct
  misc_feature 1..42: note = Category: MG29-1 sgRNA targeting hRosa26
  misc_feature 1..42: note = Description: MG29-1-hRosa26-sgRNA-B2
  source 1..42: mol_type = other RNA
taatttctactgttgtagatttggttgggtgtggtggctcac

SEQ ID NO: 4980 - RNA, 42 nt, synthetic construct
  misc_feature 1..42: note = Category: MG29-1 sgRNA targeting hRosa26
  misc_feature 1..42: note = Description: MG29-1-hRosa26-sgRNA-C2
  source 1..42: mol_type = other RNA
taatttctactgttgtagattggttgggtgtggtggctcaca

SEQ ID NO: 4981 - RNA, 42 nt, synthetic construct
  misc_feature 1..42: note = Category: MG29-1 sgRNA targeting hRosa26
  misc_feature 1..42: note = Description: MG29-1-hRosa26-sgRNA-D2
  source 1..42: mol_type = other RNA
taatttctactgttgtagatggttgggtgtggtggctcacac

SEQ ID NO: 4982 - RNA, 42 nt, synthetic construct
  misc_feature 1..42: note = Category: MG29-1 sgRNA targeting hRosa26
  misc_feature 1..42: note = Description: MG29-1-hRosa26-sgRNA-E2
  source 1..42: mol_type = other RNA
taatttctactgttgtagatgttgggtgtggtggctcacacc

SEQ ID NO: 4983 - RNA, 42 nt, synthetic construct
  misc_feature 1..42: note = Category: MG29-1 sgRNA targeting hRosa26
  misc_feature 1..42: note = Description: MG29-1-hRosa26-sgRNA-F2
  source 1..42: mol_type = other RNA
taatttctactgttgtagatgaaggatgaggcagaaggatca

SEQ ID NO: 4984 - RNA, 42 nt, synthetic construct
  misc_feature 1..42: note = Category: MG29-1 sgRNA targeting hRosa26
  misc_feature 1..42: note = Description: MG29-1-hRosa26-sgRNA-G2
  source 1..42: mol_type = other RNA
taatttctactgttgtagatggaggccaaggcgggcggatca

SEQ ID NO: 4985 - RNA, 42 nt, synthetic construct
  misc_feature 1..42: note = Category: MG29-1 sgRNA targeting hRosa26
  misc_feature 1..42: note = Description: MG29-1-hRosa26-sgRNA-H2
  source 1..42: mol_type = other RNA
taatttctactgttgtagatcgccattctcctgcctcagcct

SEQ ID NO: 4986 - RNA, 42 nt, synthetic construct
  misc_feature 1..42: note = Category: MG29-1 sgRNA targeting hRosa26
  misc_feature 1..42: note = Description: MG29-1-hRosa26-sgRNA-A3
  source 1..42: mol_type = other RNA
taatttctactgttgtagatttgtgtttttagtagagaaggg

SEQ ID NO: 4987 - RNA, 42 nt, synthetic construct
  misc_feature 1..42: note = Category: MG29-1 sgRNA targeting hRosa26
  misc_feature 1..42: note = Description: MG29-1-hRosa26-sgRNA-B3
  source 1..42: mol_type = other RNA
taatttctactgttgtagattgtgtttttagtagagaagggg

SEQ ID NO: 4988 - RNA, 42 nt, synthetic construct
  misc_feature 1..42: note = Category: MG29-1 sgRNA targeting hRosa26
  misc_feature 1..42: note = Description: MG29-1-hRosa26-sgRNA-C3
  source 1..42: mol_type = other RNA
taatttctactgttgtagatgtgtttttagtagagaaggggt

SEQ ID NO: 4989 - RNA, 42 nt, synthetic construct
  misc_feature 1..42: note = Category: MG29-1 sgRNA targeting hRosa26
  misc_feature 1..42: note = Description: MG29-1-hRosa26-sgRNA-D3
  source 1..42: mol_type = other RNA
taatttctactgttgtagattgtttttagtagagaaggggtt

SEQ ID NO: 4990 - RNA, 42 nt, synthetic construct
  misc_feature 1..42: note = Category: MG29-1 sgRNA targeting hRosa26
  misc_feature 1..42: note = Description: MG29-1-hRosa26-sgRNA-E3
  source 1..42: mol_type = other RNA
taatttctactgttgtagattagtagagaaggggtttcaccg

SEQ ID NO: 4991 - RNA, 42 nt, synthetic construct
  misc_feature 1..42: note = Category: MG29-1 sgRNA targeting hRosa26
  misc_feature 1..42: note = Description: MG29-1-hRosa26-sgRNA-F3
  source 1..42: mol_type = other RNA
taatttctactgttgtagatagtagagaaggggtttcaccgt

SEQ ID NO: 4992 - RNA, 42 nt, synthetic construct
  misc_feature 1..42: note = Category: MG29-1 sgRNA targeting hRosa26
  misc_feature 1..42: note = Description: MG29-1-hRosa26-sgRNA-G3
  source 1..42: mol_type = other RNA
taatttctactgttgtagatgtagagaaggggtttcaccgtg

SEQ ID NO: 4993 - RNA, 42 nt, synthetic construct
  misc_feature 1..42: note = Category: MG29-1 sgRNA targeting hRosa26
  misc_feature 1..42: note = Description: MG29-1-hRosa26-sgRNA-H3
  source 1..42: mol_type = other RNA
taatttctactgttgtagataccgtgttagccaggatggtct

SEQ ID NO: 4994 - RNA, 42 nt, synthetic construct
  misc_feature 1..42: note = Category: MG29-1 sgRNA targeting hRosa26
  misc_feature 1..42: note = Description: MG29-1-hRosa26-sgRNA-A4
  source 1..42: mol_type = other RNA
taatttctactgttgtagatgaactccttggctcaagtgatc

SEQ ID NO: 4995 - RNA, 42 nt, synthetic construct
  misc_feature 1..42: note = Category: MG29-1 sgRNA targeting hRosa26
  misc_feature 1..42: note = Description: MG29-1-hRosa26-sgRNA-B4
  source 1..42: mol_type = other RNA
taatttctactgttgtagataactccttggctcaagtgatcc

SEQ ID NO: 4996 - RNA, 42 nt, synthetic construct
  misc_feature 1..42: note = Category: MG29-1 sgRNA targeting hRosa26
  misc_feature 1..42: note = Description: MG29-1-hRosa26-sgRNA-C4
  source 1..42: mol_type = other RNA
taatttctactgttgtagatttttttttcttgagtcagagtc

SEQ ID NO: 4997 - RNA, 42 nt, synthetic construct
  misc_feature 1..42: note = Category: MG29-1 sgRNA targeting hRosa26
  misc_feature 1..42: note = Description: MG29-1-hRosa26-sgRNA-D4
  source 1..42: mol_type = other RNA
taatttctactgttgtagatttttcttgagtcagagtcttgc

SEQ ID NO: 4998 - RNA, 42 nt, synthetic construct
  misc_feature 1..42: note = Category: MG29-1 sgRNA targeting hRosa26
  misc_feature 1..42: note = Description: MG29-1-hRosa26-sgRNA-E4
  source 1..42: mol_type = other RNA
taatttctactgttgtagattttcttgagtcagagtcttgct

SEQ ID NO: 4999 - RNA, 42 nt, synthetic construct
  misc_feature 1..42: note = Category: MG29-1 sgRNA targeting hRosa26
  misc_feature 1..42: note = Description: MG29-1-hRosa26-sgRNA-F4
  source 1..42: mol_type = other RNA
taatttctactgttgtagatttcttgagtcagagtcttgctc

SEQ ID NO: 5000 - RNA, 42 nt, synthetic construct
  misc_feature 1..42: note = Category: MG29-1 sgRNA targeting hRosa26
  misc_feature 1..42: note = Description: MG29-1-hRosa26-sgRNA-G4
  source 1..42: mol_type = other RNA
taatttctactgttgtagattcttgagtcagagtcttgctcc

SEQ ID NO: 5001 - RNA, 42 nt, synthetic construct
  misc_feature 1..42: note = Category: MG29-1 sgRNA targeting hRosa26
  misc_feature 1..42: note = Description: MG29-1-hRosa26-sgRNA-H4
  source 1..42: mol_type = other RNA
taatttctactgttgtagatcttgagtcagagtcttgctccg

SEQ ID NO: 5002 - RNA, 42 nt, synthetic construct
  misc_feature 1..42: note = Category: MG29-1 sgRNA targeting hRosa26
  misc_feature 1..42: note = Description: MG29-1-hRosa26-sgRNA-A5
  source 1..42: mol_type = other RNA
taatttctactgttgtagatttgagtcagagtcttgctccgt

SEQ ID NO: 5003 - RNA, 42 nt, synthetic construct
  misc_feature 1..42: note = Category: MG29-1 sgRNA targeting hRosa26
  misc_feature 1..42: note = Description: MG29-1-hRosa26-sgRNA-B5
  source 1..42: mol_type = other RNA
taatttctactgttgtagattgtatttttagtagagatgggg

SEQ ID NO: 5004 - RNA, 42 nt, synthetic construct
  misc_feature 1..42: note = Category: MG29-1 sgRNA targeting hRosa26
  misc_feature 1..42: note = Description: MG29-1-hRosa26-sgRNA-C5
  source 1..42: mol_type = other RNA
taatttctactgttgtagatgtatttttagtagagatggggt

SEQ ID NO: 5005 - RNA, 42 nt, synthetic construct
  misc_feature 1..42: note = Category: MG29-1 sgRNA targeting hRosa26
  misc_feature 1..42: note = Description: MG29-1-hRosa26-sgRNA-D5
  source 1..42: mol_type = other RNA
taatttctactgttgtagattatttttagtagagatggggtt

SEQ ID NO: 5006 - RNA, 42 nt, synthetic construct
  misc_feature 1..42: note = Category: MG29-1 sgRNA targeting hRosa26
  misc_feature 1..42: note = Description: MG29-1-hRosa26-sgRNA-E5
  source 1..42: mol_type = other RNA
taatttctactgttgtagattagtagagatggggtttcacca

SEQ ID NO: 5007 - RNA, 42 nt, synthetic construct
  misc_feature 1..42: note = Category: MG29-1 sgRNA targeting hRosa26
  misc_feature 1..42: note = Description: MG29-1-hRosa26-sgRNA-F5
  source 1..42: mol_type = other RNA
taatttctactgttgtagatagtagagatggggtttcaccac

SEQ ID NO: 5008 - RNA, 42 nt, synthetic construct
  misc_feature 1..42: note = Category: MG29-1 sgRNA targeting hRosa26
  misc_feature 1..42: note = Description: MG29-1-hRosa26-sgRNA-G5
  source 1..42: mol_type = other RNA
taatttctactgttgtagatgtagagatggggtttcaccacg

SEQ ID NO: 5009 - RNA, 42 nt, synthetic construct
  misc_feature 1..42: note = Category: MG29-1 sgRNA targeting hRosa26
  misc_feature 1..42: note = Description: MG29-1-hRosa26-sgRNA-H5
  source 1..42: mol_type = other RNA
taatttctactgttgtagataccacgttggtcaggctggtct

SEQ ID NO: 5010 - RNA, 42 nt, synthetic construct
  misc_feature 1..42: note = Category: MG29-1 sgRNA targeting hRosa26
  misc_feature 1..42: note = Description: MG29-1-hRosa26-sgRNA-A6
  source 1..42: mol_type = other RNA
taatttctactgttgtagataccttcctgtgacttcctggag

SEQ ID NO: 5011 - RNA, 42 nt, synthetic construct
  misc_feature 1..42: note = Category: MG29-1 sgRNA targeting hRosa26
  misc_feature 1..42: note = Description: MG29-1-hRosa26-sgRNA-B6
  source 1..42: mol_type = other RNA
taatttctactgttgtagatccttcctgtgacttcctggaga

SEQ ID NO: 5012 - RNA, 42 nt, synthetic construct
  misc_feature 1..42: note = Category: MG29-1 sgRNA targeting hRosa26
  misc_feature 1..42: note = Description: MG29-1-hRosa26-sgRNA-C6
  source 1..42: mol_type = other RNA
taatttctactgttgtagattggggaaggttctctgtctgcc

SEQ ID NO: 5013 - DNA, 22 bp, unidentified
  misc_feature 1..22: note = Description of Unknown:MG29-1-hRosa26-target site-A1 sequence
  misc_feature 1..22: note = Category: DNA sequence of hRosa26 target site
  source 1..22: mol_type = genomic DNA; note = uncultivated organism sequence
aggtcactgtcctagctctcca

SEQ ID NO: 5014 - DNA, 22 bp, unidentified
  misc_feature 1..22: note = Description of Unknown:MG29-1-hRosa26-target site-B1 sequence
  misc_feature 1..22: note = Category: DNA sequence of hRosa26 target site
  source 1..22: mol_type = genomic DNA; note = uncultivated organism sequence
tttttaggccgggcgcggtggc

SEQ ID NO: 5015 - DNA, 22 bp, unidentified
  misc_feature 1..22: note = Description of Unknown:MG29-1-hRosa26-target site-C1 sequence
  misc_feature 1..22: note = Category: DNA sequence of hRosa26 target site
  source 1..22: mol_type = genomic DNA; note = uncultivated organism sequence
taggccgggcgcggtggctcac

SEQ ID NO: 5016 - DNA, 22 bp, unidentified
  misc_feature 1..22: note = Description of Unknown:MG29-1-hRosa26-target site-D1 sequence
  misc_feature 1..22: note = Category: DNA sequence of hRosa26 target site
  source 1..22: mol_type = genomic DNA; note = uncultivated organism sequence
aggccgggcgcggtggctcaca

SEQ ID NO: 5017 - DNA, 22 bp, unidentified
  misc_feature 1..22: note = Description of Unknown:MG29-1-hRosa26-target site-E1 sequence
  misc_feature 1..22: note = Category: DNA sequence of hRosa26 target site
  source 1..22: mol_type = genomic DNA; note = uncultivated organism sequence
ggccgggcgcggtggctcacac

SEQ ID NO: 5018 - DNA, 22 bp, unidentified
  misc_feature 1..22: note = Description of Unknown:MG29-1-hRosa26-target site-F1 sequence
  misc_feature 1..22: note = Category: DNA sequence of hRosa26 target site
  source 1..22: mol_type = genomic DNA; note = uncultivated organism sequence
ggaggccgaggcaggcagatca

SEQ ID NO: 5019 - DNA, 22 bp, unidentified
  misc_feature 1..22: note = Description of Unknown:MG29-1-hRosa26-target site-G1 sequence
  misc_feature 1..22: note = Category: DNA sequence of hRosa26 target site
  source 1..22: mol_type = genomic DNA; note = uncultivated organism sequence
aggtcaggagttcaagaccagc

SEQ ID NO: 5020 - DNA, 22 bp, unidentified
  misc_feature 1..22: note = Description of Unknown:MG29-1-hRosa26-target site-H1 sequence
  misc_feature 1..22: note = Category: DNA sequence of hRosa26 target site
  source 1..22: mol_type = genomic DNA; note = uncultivated organism sequence
cagtgagctgagatcgtgccat

SEQ ID NO: 5021 - DNA, 22 bp, unidentified
  misc_feature 1..22: note = Description of Unknown:MG29-1-hRosa26-target site-A2 sequence
  misc_feature 1..22: note = Category: DNA sequence of hRosa26 target site
  source 1..22: mol_type = genomic DNA; note = uncultivated organism sequence
ttttttggttgggtgtggtggc

SEQ ID NO: 5022 - DNA, 22 bp, unidentified
  misc_feature 1..22: note = Description of Unknown:MG29-1-hRosa26-target site-B2 sequence
  misc_feature 1..22: note = Category: DNA sequence of hRosa26 target site
  source 1..22: mol_type = genomic DNA; note = uncultivated organism sequence
ttggttgggtgtggtggctcac

SEQ ID NO: 5023 - DNA, 22 bp, unidentified
  misc_feature 1..22: note = Description of Unknown:MG29-1-hRosa26-target site-C2 sequence
  misc_feature 1..22: note = Category: DNA sequence of hRosa26 target site
  source 1..22: mol_type = genomic DNA; note = uncultivated organism sequence
tggttgggtgtggtggctcaca

SEQ ID NO: 5024 - DNA, 22 bp, unidentified
  misc_feature 1..22: note = Description of Unknown:MG29-1-hRosa26-target site-D2 sequence
  misc_feature 1..22: note = Category: DNA sequence of hRosa26 target site
  source 1..22: mol_type = genomic DNA; note = uncultivated organism sequence
ggttgggtgtggtggctcacac

SEQ ID NO: 5025 - DNA, 22 bp, unidentified
  misc_feature 1..22: note = Description of Unknown:MG29-1-hRosa26-target site-E2 sequence
  misc_feature 1..22: note = Category: DNA sequence of hRosa26 target site
  source 1..22: mol_type = genomic DNA; note = uncultivated organism sequence
gttgggtgtggtggctcacacc

SEQ ID NO: 5026 - DNA, 22 bp, unidentified
  misc_feature 1..22: note = Description of Unknown:MG29-1-hRosa26-target site-F2 sequence
  misc_feature 1..22: note = Category: DNA sequence of hRosa26 target site
  source 1..22: mol_type = genomic DNA; note = uncultivated organism sequence
gaaggatgaggcagaaggatca

SEQ ID NO: 5027 - DNA, 22 bp, unidentified
  misc_feature 1..22: note = Description of Unknown:MG29-1-hRosa26-target site-G2 sequence
  misc_feature 1..22: note = Category: DNA sequence of hRosa26 target site
  source 1..22: mol_type = genomic DNA; note = uncultivated organism sequence
ggaggccaaggcgggcggatca

SEQ ID NO: 5028 - DNA, 22 bp, unidentified
  misc_feature 1..22: note = Description of Unknown:MG29-1-hRosa26-target site-H2 sequence
  misc_feature 1..22: note = Category: DNA sequence of hRosa26 target site
  source 1..22: mol_type = genomic DNA; note = uncultivated organism sequence
cgccattctcctgcctcagcct

SEQ ID NO: 5029 - DNA, 22 bp, unidentified
  misc_feature 1..22: note = Description of Unknown:MG29-1-hRosa26-target site-A3 sequence
  misc_feature 1..22: note = Category: DNA sequence of hRosa26 target site
  source 1..22: mol_type = genomic DNA; note = uncultivated organism sequence
ttgtgtttttagtagagaaggg

SEQ ID NO: 5030 - DNA, 22 bp, unidentified
  misc_feature 1..22: note = Description of Unknown:MG29-1-hRosa26-target site-B3 sequence
  misc_feature 1..22: note = Category: DNA sequence of hRosa26 target site
  source 1..22: mol_type = genomic DNA; note = uncultivated organism sequence
tgtgtttttagtagagaagggg

SEQ ID NO: 5031 - DNA, 22 bp, unidentified
  misc_feature 1..22: note = Description of Unknown:MG29-1-hRosa26-target site-C3 sequence
  misc_feature 1..22: note = Category: DNA sequence of hRosa26 target site
  source 1..22: mol_type = genomic DNA; note = uncultivated organism sequence
gtgtttttagtagagaaggggt

SEQ ID NO: 5032 - DNA, 22 bp, unidentified
  misc_feature 1..22: note = Description of Unknown:MG29-1-hRosa26-target site-D3 sequence
  misc_feature 1..22: note = Category: DNA sequence of hRosa26 target site
  source 1..22: mol_type = genomic DNA; note = uncultivated organism sequence
tgtttttagtagagaaggggtt

SEQ ID NO: 5033 - DNA, 22 bp, unidentified
  misc_feature 1..22: note = Description of Unknown:MG29-1-hRosa26-target site-E3 sequence
  misc_feature 1..22: note = Category: DNA sequence of hRosa26 target site
  source 1..22: mol_type = genomic DNA; note = uncultivated organism sequence
tagtagagaaggggtttcaccg

SEQ ID NO: 5034 - DNA, 22 bp, unidentified
  misc_feature 1..22: note = Description of Unknown:MG29-1-hRosa26-target site-F3 sequence
  misc_feature 1..22: note = Category: DNA sequence of hRosa26 target site
  source 1..22: mol_type = genomic DNA; note = uncultivated organism sequence
agtagagaaggggtttcaccgt

SEQ ID NO: 5035 - DNA, 22 bp, unidentified
  misc_feature 1..22: note = Description of Unknown:MG29-1-hRosa26-target site-G3 sequence
  misc_feature 1..22: note = Category: DNA sequence of hRosa26 target site
  source 1..22: mol_type = genomic DNA; note = uncultivated organism sequence
gtagagaaggggtttcaccgtg

SEQ ID NO: 5036 - DNA, 22 bp, unidentified
  misc_feature 1..22: note = Description of Unknown:MG29-1-hRosa26-target site-H3 sequence
  misc_feature 1..22: note = Category: DNA sequence of hRosa26 target site
  source 1..22: mol_type = genomic DNA; note = uncultivated organism sequence
accgtgttagccaggatggtct

SEQ ID NO: 5037 - DNA, 22 bp, unidentified
  misc_feature 1..22: note = Description of Unknown:MG29-1-hRosa26-target site-A4 sequence
  misc_feature 1..22: note = Category: DNA sequence of hRosa26 target site
  source 1..22: mol_type = genomic DNA; note = uncultivated organism sequence
gaactccttggctcaagtgatc

SEQ ID NO: 5038 - DNA, 22 bp, unidentified
  misc_feature 1..22: note = Description of Unknown:MG29-1-hRosa26-target site-B4 sequence
  misc_feature 1..22: note = Category: DNA sequence of hRosa26 target site
  source 1..22: mol_type = genomic DNA; note = uncultivated organism sequence
aactccttggctcaagtgatcc

SEQ ID NO: 5039 - DNA, 22 bp, unidentified
  misc_feature 1..22: note = Description of Unknown:MG29-1-hRosa26-target site-C4 sequence
  misc_feature 1..22: note = Category: DNA sequence of hRosa26 target site
  source 1..22: mol_type = genomic DNA; note = uncultivated organism sequence
ttttttttcttgagtcagagtc

SEQ ID NO: 5040 - DNA, 22 bp, unidentified
  misc_feature 1..22: note = Description of Unknown:MG29-1-hRosa26-target site-D4 sequence
  misc_feature 1..22: note = Category: DNA sequence of hRosa26 target site
  source 1..22: mol_type = genomic DNA; note = uncultivated organism sequence
ttttcttgagtcagagtcttgc

SEQ ID NO: 5041 - DNA, 22 bp, unidentified
  misc_feature 1..22: note = Description of Unknown:MG29-1-hRosa26-target site-E4 sequence
  misc_feature 1..22: note = Category: DNA sequence of hRosa26 target site
  source 1..22: mol_type = genomic DNA; note = uncultivated organism sequence
tttcttgagtcagagtcttgct

SEQ ID NO: 5042 - DNA, 22 bp, unidentified
  misc_feature 1..22: note = Description of Unknown:MG29-1-hRosa26-target site-F4 sequence
  misc_feature 1..22: note = Category: DNA sequence of hRosa26 target site
  source 1..22: mol_type = genomic DNA; note = uncultivated organism sequence
ttcttgagtcagagtcttgctc

SEQ ID NO: 5043 - DNA, 22 bp, unidentified
  misc_feature 1..22: note = Description of Unknown:MG29-1-hRosa26-target site-G4 sequence
  misc_feature 1..22: note = Category: DNA sequence of hRosa26 target site
  source 1..22: mol_type = genomic DNA; note = uncultivated organism sequence
tcttgagtcagagtcttgctcc

SEQ ID NO: 5044 - DNA, 22 bp, unidentified
  misc_feature 1..22: note = Description of Unknown:MG29-1-hRosa26-target site-H4 sequence
  misc_feature 1..22: note = Category: DNA sequence of hRosa26 target site
  source 1..22: mol_type = genomic DNA; note = uncultivated organism sequence
cttgagtcagagtcttgctccg

SEQ ID NO: 5045 - DNA, 22 bp, unidentified
  misc_feature 1..22: note = Description of Unknown:MG29-1-hRosa26-target site-A5 sequence
  misc_feature 1..22: note = Category: DNA sequence of hRosa26 target site
  source 1..22: mol_type = genomic DNA; note = uncultivated organism sequence
ttgagtcagagtcttgctccgt

SEQ ID NO: 5046 - DNA, 22 bp, unidentified
  misc_feature 1..22: note = Description of Unknown:MG29-1-hRosa26-target site-B5 sequence
  misc_feature 1..22: note = Category: DNA sequence of hRosa26 target site
  source 1..22: mol_type = genomic DNA; note = uncultivated organism sequence
tgtatttttagtagagatgggg

SEQ ID NO: 5047 - DNA, 22 bp, unidentified
  misc_feature 1..22: note = Description of Unknown:MG29-1-hRosa26-target site-C5 sequence
  misc_feature 1..22: note = Category: DNA sequence of hRosa26 target site
  source 1..22: mol_type = genomic DNA; note = uncultivated organism sequence
gtatttttagtagagatggggt

SEQ ID NO: 5048 - DNA, 22 bp, unidentified
  misc_feature 1..22: note = Description of Unknown:MG29-1-hRosa26-target site-D5 sequence
  misc_feature 1..22: note = Category: DNA sequence of hRosa26 target site
  source 1..22: mol_type = genomic DNA; note = uncultivated organism sequence
tatttttagtagagatggggtt

SEQ ID NO: 5049 - DNA, 22 bp, unidentified
  misc_feature 1..22: note = Description of Unknown:MG29-1-hRosa26-target site-E5 sequence
  misc_feature 1..22: note = Category: DNA sequence of hRosa26 target site
  source 1..22: mol_type = genomic DNA; note = uncultivated organism sequence
tagtagagatggggtttcacca

SEQ ID NO: 5050 - DNA, 22 bp, unidentified
  misc_feature 1..22: note = Description of Unknown:MG29-1-hRosa26-target site-F5 sequence
  misc_feature 1..22: note = Category: DNA sequence of hRosa26 target site
  source 1..22: mol_type = genomic DNA; note = uncultivated organism sequence
agtagagatggggtttcaccac

SEQ ID NO: 5051 - DNA, 22 bp, unidentified
  misc_feature 1..22: note = Description of Unknown:MG29-1-hRosa26-target site-G5 sequence
  misc_feature 1..22: note = Category: DNA sequence of hRosa26 target site
  source 1..22: mol_type = genomic DNA; note = uncultivated organism sequence
gtagagatggggtttcaccacg

SEQ ID NO: 5052 - DNA, 22 bp, unidentified
  misc_feature 1..22: note = Description of Unknown:MG29-1-hRosa26-target site-H5 sequence
  misc_feature 1..22: note = Category: DNA sequence of hRosa26 target site
  source 1..22: mol_type = genomic DNA; note = uncultivated organism sequence
accacgttggtcaggctggtct

SEQ ID NO: 5053 - DNA, 22 bp, unidentified
  misc_feature 1..22: note = Description of Unknown:MG29-1-hRosa26-target site-A6 sequence
  misc_feature 1..22: note = Category: DNA sequence of hRosa26 target site
  source 1..22: mol_type = genomic DNA; note = uncultivated organism sequence
accttcctgtgacttcctggag

SEQ ID NO: 5054 - DNA, 22 bp, unidentified
  misc_feature 1..22: note = Description of Unknown:MG29-1-hRosa26-target site-B6 sequence
  misc_feature 1..22: note = Category: DNA sequence of hRosa26 target site
  source 1..22: mol_type = genomic DNA; note = uncultivated organism sequence
ccttcctgtgacttcctggaga

SEQ ID NO: 5055 - DNA, 22 bp, unidentified
  misc_feature 1..22: note = Description of Unknown:MG29-1-hRosa26-target site-C6 sequence
  misc_feature 1..22: note = Category: DNA sequence of hRosa26 target site
  source 1..22: mol_type = genomic DNA; note = uncultivated organism sequence
tggggaaggttctctgtctgcc

SEQ ID NO: 5056 - RNA, 42 nt, synthetic construct
  misc_feature 1..42: note = Category: MG29-1 sgRNA targeting mouse TRAC
  misc_feature 1..42: note = Description: MG29-1-mTRAC-sgRNA-A1
  source 1..42: mol_type = other RNA
taatttctactgttgtagatactcccaaatcaatgtgccgaa

SEQ ID NO: 5057 - RNA, 42 nt, synthetic construct
  misc_feature 1..42: note = Category: MG29-1 sgRNA targeting mouse TRAC
  misc_feature 1..42: note = Description: MG29-1-mTRAC-sgRNA-B1
  source 1..42: mol_type = other RNA
taatttctactgttgtagataagatatcttggcaggtgaagc

SEQ ID NO: 5058 - RNA, 42 nt, synthetic construct
  misc_feature 1..42: note = Category: MG29-1 sgRNA targeting mouse TRAC
  misc_feature 1..42: note = Description: MG29-1-mTRAC-sgRNA-C1
  source 1..42: mol_type = other RNA
taatttctactgttgtagatatgtccagcacagttttgtcag

SEQ ID NO: 5059 - RNA, 42 nt, synthetic construct
  misc_feature 1..42: note = Category: MG29-1 sgRNA targeting mouse TRAC
  misc_feature 1..42: note = Description: MG29-1-mTRAC-sgRNA-D1
  source 1..42: mol_type = other RNA
taatttctactgttgtagatgtcagtgatgaacgttccagat

SEQ ID NO: 5060 - RNA, 42 nt, synthetic construct
  misc_feature 1..42: note = Category: MG29-1 sgRNA targeting mouse TRAC
  misc_feature 1..42: note = Description: MG29-1-mTRAC-sgRNA-E1
  source 1..42: mol_type = other RNA
taatttctactgttgtagattcagtgatgaacgttccagatt

SEQ ID NO: 5061 - RNA, 42 nt, synthetic construct
  misc_feature 1..42: note = Category: MG29-1 sgRNA targeting mouse TRAC
  misc_feature 1..42: note = Description: MG29-1-mTRAC-sgRNA-F1
  source 1..42: mol_type = other RNA
taatttctactgttgtagatcggcacattgatttgggagtca

SEQ ID NO: 5062 - RNA, 42 nt, synthetic construct
  misc_feature 1..42: note = Category: MG29-1 sgRNA targeting mouse TRAC
  misc_feature 1..42: note = Description: MG29-1-mTRAC-sgRNA-G1
  source 1..42: mol_type = other RNA
taatttctactgttgtagatggcacattgatttgggagtcaa

SEQ ID NO: 5063 - RNA, 42 nt, synthetic construct
  misc_feature 1..42: note = Category: MG29-1 sgRNA targeting mouse TRAC
  misc_feature 1..42: note = Description: MG29-1-mTRAC-sgRNA-H1
  source 1..42: mol_type = other RNA
taatttctactgttgtagatggagtcaaagtcggtgaacagg

SEQ ID NO: 5064 - RNA, 42 nt, synthetic construct
  misc_feature 1..42: note = Category: MG29-1 sgRNA targeting mouse TRAC
  misc_feature 1..42: note = Description: MG29-1-mTRAC-sgRNA-A2
  source 1..42: mol_type = other RNA
taatttctactgttgtagataactggtacacagcaggttctg

SEQ ID NO: 5065 - RNA, 42 nt, synthetic construct
  misc_feature 1..42: note = Category: MG29-1 sgRNA targeting mouse TRAC
  misc_feature 1..42: note = Description: MG29-1-mTRAC-sgRNA-B2
  source 1..42: mol_type = other RNA
taatttctactgttgtagatactggtacacagcaggttctgg

SEQ ID NO: 5066 - RNA, 42 nt, synthetic construct
  misc_feature 1..42: note = Category: MG29-1 sgRNA targeting mouse TRAC
  misc_feature 1..42: note = Description: MG29-1-mTRAC-sgRNA-C2
  source 1..42: mol_type = other RNA
taatttctactgttgtagatttttcccttttagacgttccct

SEQ ID NO: 5067 - RNA, 42 nt, synthetic construct
  misc_feature 1..42: note = Category: MG29-1 sgRNA targeting mouse TRAC
  misc_feature 1..42: note = Description: MG29-1-mTRAC-sgRNA-D2
  source 1..42: mol_type = other RNA
taatttctactgttgtagatcccttttagacgttccctgtga

SEQ ID NO: 5068 - RNA, 42 nt, synthetic construct
  misc_feature 1..42: note = Category: MG29-1 sgRNA targeting mouse TRAC
  misc_feature 1..42: note = Description: MG29-1-mTRAC-sgRNA-E2
  source 1..42: mol_type = other RNA
taatttctactgttgtagatccttttagacgttccctgtgat

SEQ ID NO: 5069 - RNA, 42 nt, synthetic construct
  misc_feature 1..42: note = Category: MG29-1 sgRNA targeting mouse TRAC
  misc_feature 1..42: note = Description: MG29-1-mTRAC-sgRNA-F2
  source 1..42: mol_type = other RNA
taatttctactgttgtagatagacgttccctgtgatgccacg

SEQ ID NO: 5070 - RNA, 42 nt, synthetic construct
  misc_feature 1..42: note = Category: MG29-1 sgRNA targeting mouse TRAC
  misc_feature 1..42: note = Description: MG29-1-mTRAC-sgRNA-G2
  source 1..42: mol_type = other RNA
taatttctactgttgtagatgacgttccctgtgatgccacgt

SEQ ID NO: 5071 - RNA, 42 nt, synthetic construct
  misc_feature 1..42: note = Category: MG29-1 sgRNA targeting mouse TRAC
  misc_feature 1..42: note = Description: MG29-1-mTRAC-sgRNA-H2
  source 1..42: mol_type = other RNA
taatttctactgttgtagataaagcttttctcagtcaacgtg

SEQ ID NO: 5072 - RNA, 42 nt, synthetic construct
  misc_feature 1..42: note = Category: MG29-1 sgRNA targeting mouse TRAC
  misc_feature 1..42: note = Description: MG29-1-mTRAC-sgRNA-A3
  source 1..42: mol_type = other RNA
taatttctactgttgtagatctcagtcaacgtggcatcacag

SEQ ID NO: 5073 - RNA, 42 nt, synthetic construct
  misc_feature 1..42: note = Category: MG29-1 sgRNA targeting mouse TRAC
  misc_feature 1..42: note = Description: MG29-1-mTRAC-sgRNA-B3
  source 1..42: mol_type = other RNA
taatttctactgttgtagattcagtcaacgtggcatcacagg

SEQ ID NO: 5074 - RNA, 42 nt, synthetic construct
  misc_feature 1..42: note = Category: MG29-1 sgRNA targeting mouse TRAC
  misc_feature 1..42: note = Description: MG29-1-mTRAC-sgRNA-C3
  source 1..42: mol_type = other RNA
taatttctactgttgtagatacagatatgaacctaaactttc

SEQ ID NO: 5075 - RNA, 42 nt, synthetic construct
  misc_feature 1..42: note = Category: MG29-1 sgRNA targeting mouse TRAC
  misc_feature 1..42: note = Description: MG29-1-mTRAC-sgRNA-D3
  source 1..42: mol_type = other RNA
taatttctactgttgtagatcagatatgaacctaaactttca

SEQ ID NO: 5076 - RNA, 42 nt, synthetic construct
  misc_feature 1..42: note = Category: MG29-1 sgRNA targeting mouse TRAC
  misc_feature 1..42: note = Description: MG29-1-mTRAC-sgRNA-E3
  source 1..42: mol_type = other RNA
taatttctactgttgtagataaaacctgtcagttatgggact

SEQ ID NO: 5077 - RNA, 42 nt, synthetic construct
  misc_feature 1..42: note = Category: MG29-1 sgRNA targeting mouse TRAC
  misc_feature 1..42: note = Description: MG29-1-mTRAC-sgRNA-F3
  source 1..42: mol_type = other RNA
taatttctactgttgtagatacctgctcatgacgctgaggct

SEQ ID NO: 5078 - RNA, 42 nt, synthetic construct
  misc_feature 1..42: note = Category: MG29-1 sgRNA targeting mouse TRAC
  misc_feature 1..42: note = Description: MG29-1-mTRAC-sgRNA-G3
  source 1..42: mol_type = other RNA
taatttctactgttgtagatatgccttcttacctcaactgga

SEQ ID NO: 5079 - RNA, 42 nt, synthetic construct
  misc_feature 1..42: note = Category: MG29-1 sgRNA targeting mouse TRAC
  misc_feature 1..42: note = Description: MG29-1-mTRAC-sgRNA-H3
  source 1..42: mol_type = other RNA
taatttctactgttgtagatagcaggaggattcggagtccca

SEQ ID NO: 5080 - RNA, 42 nt, synthetic construct
  misc_feature 1..42: note = Category: MG29-1 sgRNA targeting mouse TRAC
  misc_feature 1..42: note = Description: MG29-1-mTRAC-sgRNA-A4
  source 1..42: mol_type = other RNA
taatttctactgttgtagattgaggaaggttgctggagagct

SEQ ID NO: 5081 - RNA, 42 nt, synthetic construct
  misc_feature 1..42: note = Category: MG29-1 sgRNA targeting mouse TRAC
  misc_feature 1..42: note = Description: MG29-1-mTRAC-sgRNA-B4
  source 1..42: mol_type = other RNA
taatttctactgttgtagatttgttttttttttttttgcggg

SEQ ID NO: 5082 - RNA, 42 nt, synthetic construct
  misc_feature 1..42: note = Category: MG29-1 sgRNA targeting mouse TRAC
  misc_feature 1..42: note = Description: MG29-1-mTRAC-sgRNA-C4
  source 1..42: mol_type = other RNA
taatttctactgttgtagattgttttttttttttttgcgggt

SEQ ID NO: 5083 - RNA, 42 nt, synthetic construct
  misc_feature 1..42: note = Category: MG29-1 sgRNA targeting mouse TRAC
  misc_feature 1..42: note = Description: MG29-1-mTRAC-sgRNA-D4
  source 1..42: mol_type = other RNA
taatttctactgttgtagatgttttttttttttttgcgggtt

SEQ ID NO: 5084 - RNA, 42 nt, synthetic construct
  misc_feature 1..42: note = Category: MG29-1 sgRNA targeting mouse TRAC
  misc_feature 1..42: note = Description: MG29-1-mTRAC-sgRNA-E4
  source 1..42: mol_type = other RNA
taatttctactgttgtagatttttttttttttttgcgggttt

SEQ ID NO: 5085 - RNA, 42 nt, synthetic construct
  misc_feature 1..42: note = Category: MG29-1 sgRNA targeting mouse TRAC
  misc_feature 1..42: note = Description: MG29-1-mTRAC-sgRNA-F4
  source 1..42: mol_type = other RNA
taatttctactgttgtagatttttttttttgcgggtttattt

SEQ ID NO: 5086 - RNA, 42 nt, synthetic construct
  misc_feature 1..42: note = Category: MG29-1 sgRNA targeting mouse TRAC
  misc_feature 1..42: note = Description: MG29-1-mTRAC-sgRNA-G4
  source 1..42: mol_type = other RNA
taatttctactgttgtagattttttttttgcgggtttatttt

SEQ ID NO: 5087 - RNA, 42 nt, synthetic construct
  misc_feature 1..42: note = Category: MG29-1 sgRNA targeting mouse TRAC
  misc_feature 1..42: note = Description: MG29-1-mTRAC-sgRNA-H4
  source 1..42: mol_type = other RNA
taatttctactgttgtagatttttttttgcgggtttattttt

SEQ ID NO: 5088 - RNA, 42 nt, synthetic construct
  misc_feature 1..42: note = Category: MG29-1 sgRNA targeting mouse TRAC
  misc_feature 1..42: note = Description: MG29-1-mTRAC-sgRNA-A5
  source 1..42: mol_type = other RNA
taatttctactgttgtagattttttttgcgggtttatttttt

SEQ ID NO: 5089 - RNA, 42 nt, synthetic construct
  misc_feature 1..42: note = Category: MG29-1 sgRNA targeting mouse TRAC
  misc_feature 1..42: note = Description: MG29-1-mTRAC-sgRNA-B5
  source 1..42: mol_type = other RNA
taatttctactgttgtagatttttttgcgggtttattttttt

SEQ ID NO: 5090 - RNA, 42 nt, synthetic construct
  misc_feature 1..42: note = Category: MG29-1 sgRNA targeting mouse TRAC
  misc_feature 1..42: note = Description: MG29-1-mTRAC-sgRNA-C5
  source 1..42: mol_type = other RNA
taatttctactgttgtagattttttgcgggtttattttttta

SEQ ID NO: 5091 - RNA, 42 nt, synthetic construct
  misc_feature 1..42: note = Category: MG29-1 sgRNA targeting mouse TRAC
  misc_feature 1..42: note = Description: MG29-1-mTRAC-sgRNA-D5
  source 1..42: mol_type = other RNA
taatttctactgttgtagatttttgcgggtttatttttttaa

SEQ ID NO: 5092 - RNA, 42 nt, synthetic construct
  misc_feature 1..42: note = Category: MG29-1 sgRNA targeting mouse TRAC
  misc_feature 1..42: note = Description: MG29-1-mTRAC-sgRNA-E5
  source 1..42: mol_type = other RNA
taatttctactgttgtagattttgcgggtttatttttttaag

SEQ ID NO: 5093 - RNA, 42 nt, synthetic construct
  misc_feature 1..42: note = Category: MG29-1 sgRNA targeting mouse TRAC
  misc_feature 1..42: note = Description: MG29-1-mTRAC-sgRNA-F5
  source 1..42: mol_type = other RNA
taatttctactgttgtagatttgcgggtttatttttttaagc

SEQ ID NO: 5094 - RNA, 42 nt, synthetic construct
  misc_feature 1..42: note = Category: MG29-1 sgRNA targeting mouse TRAC
  misc_feature 1..42: note = Description: MG29-1-mTRAC-sgRNA-G5
  source 1..42: mol_type = other RNA
taatttctactgttgtagattgcgggtttatttttttaagca

SEQ ID NO: 5095 - RNA, 42 nt, synthetic construct
  misc_feature 1..42: note = Category: MG29-1 sgRNA targeting mouse TRAC
  misc_feature 1..42: note = Description: MG29-1-mTRAC-sgRNA-H5
  source 1..42: mol_type = other RNA
taatttctactgttgtagatgcgggtttatttttttaagcat

SEQ ID NO: 5096 - RNA, 42 nt, synthetic construct
  misc_feature 1..42: note = Category: MG29-1 sgRNA targeting mouse TRAC
  misc_feature 1..42: note = Description: MG29-1-mTRAC-sgRNA-A6
  source 1..42: mol_type = other RNA
taatttctactgttgtagatcgggtttatttttttaagcatc

SEQ ID NO: 5097 - RNA, 42 nt, synthetic construct
  misc_feature 1..42: note = Category: MG29-1 sgRNA targeting mouse TRAC
  misc_feature 1..42: note = Description: MG29-1-mTRAC-sgRNA-B6
  source 1..42: mol_type = other RNA
taatttctactgttgtagattttttttaagcatccatgaaga

SEQ ID NO: 5098 - RNA, 42 nt, synthetic construct
  misc_feature 1..42: note = Category: MG29-1 sgRNA targeting mouse TRAC
  misc_feature 1..42: note = Description: MG29-1-mTRAC-sgRNA-C6
  source 1..42: mol_type = other RNA
taatttctactgttgtagattttaagcatccatgaagaaatg

SEQ ID NO: 5099 - RNA, 42 nt, synthetic construct
  misc_feature 1..42: note = Category: MG29-1 sgRNA targeting mouse TRAC
  misc_feature 1..42: note = Description: MG29-1-mTRAC-sgRNA-D6
  source 1..42: mol_type = other RNA
taatttctactgttgtagatttaagcatccatgaagaaatgc

SEQ ID NO: 5100 - RNA, 42 nt, synthetic construct
  misc_feature 1..42: note = Category: MG29-1 sgRNA targeting mouse TRAC
  misc_feature 1..42: note = Description: MG29-1-mTRAC-sgRNA-E6
  source 1..42: mol_type = other RNA
taatttctactgttgtagattaagcatccatgaagaaatgca

SEQ ID NO: 5101 - RNA, 42 nt, synthetic construct
  misc_feature 1..42: note = Category: MG29-1 sgRNA targeting mouse TRAC
  misc_feature 1..42: note = Description: MG29-1-mTRAC-sgRNA-F6
  source 1..42: mol_type = other RNA
taatttctactgttgtagataagcatccatgaagaaatgcat

SEQ ID NO: 5102 - RNA, 42 nt, synthetic construct
  misc_feature 1..42: note = Category: MG29-1 sgRNA targeting mouse TRAC
  misc_feature 1..42: note = Description: MG29-1-mTRAC-sgRNA-G6
  source 1..42: mol_type = other RNA
taatttctactgttgtagatagcatccatgaagaaatgcata

SEQ ID NO: 5103 - RNA, 42 nt, synthetic construct
  misc_feature 1..42: note = Category: MG29-1 sgRNA targeting mouse TRAC
  misc_feature 1..42: note = Description: MG29-1-mTRAC-sgRNA-H6
  source 1..42: mol_type = other RNA
taatttctactgttgtagatatcaaggtgtagaaattatctc

SEQ ID NO: 5104 - RNA, 42 nt, synthetic construct
  misc_feature 1..42: note = Category: MG29-1 sgRNA targeting mouse TRAC
  misc_feature 1..42: note = Description: MG29-1-mTRAC-sgRNA-A7
  source 1..42: mol_type = other RNA
taatttctactgttgtagatggtttttctgaatcacctttaa

SEQ ID NO: 5105 - RNA, 42 nt, synthetic construct
  misc_feature 1..42: note = Category: MG29-1 sgRNA targeting mouse TRAC
  misc_feature 1..42: note = Description: MG29-1-mTRAC-sgRNA-B7
  source 1..42: mol_type = other RNA
taatttctactgttgtagatgtttttctgaatcacctttaat

SEQ ID NO: 5106 - RNA, 42 nt, synthetic construct
  misc_feature 1..42: note = Category: MG29-1 sgRNA targeting mouse TRAC
  misc_feature 1..42: note = Description: MG29-1-mTRAC-sgRNA-C7
  source 1..42: mol_type = other RNA
taatttctactgttgtagattctgaatcacctttaatgatgt

SEQ ID NO: 5107 - RNA, 42 nt, synthetic construct
  misc_feature 1..42: note = Category: MG29-1 sgRNA targeting mouse TRAC
  misc_feature 1..42: note = Description: MG29-1-mTRAC-sgRNA-D7
  source 1..42: mol_type = other RNA
taatttctactgttgtagatctgaatcacctttaatgatgtc

SEQ ID NO: 5108 - RNA, 42 nt, synthetic construct
  misc_feature 1..42: note = Category: MG29-1 sgRNA targeting mouse TRAC
  misc_feature 1..42: note = Description: MG29-1-mTRAC-sgRNA-E7
  source 1..42: mol_type = other RNA
taatttctactgttgtagattgaatcacctttaatgatgtca

SEQ ID NO: 5109 - RNA, 42 nt, synthetic construct
  misc_feature 1..42: note = Category: MG29-1 sgRNA targeting mouse TRAC
  misc_feature 1..42: note = Description: MG29-1-mTRAC-sgRNA-F7
  source 1..42: mol_type = other RNA
taatttctactgttgtagatatgatgtcatggacagcagaat

SEQ ID NO: 5110 - RNA, 42 nt, synthetic construct
  misc_feature 1..42: note = Category: MG29-1 sgRNA targeting mouse TRAC
  misc_feature 1..42: note = Description: MG29-1-mTRAC-sgRNA-G7
  source 1..42: mol_type = other RNA
taatttctactgttgtagattacaccttgatgaaagagtaat

SEQ ID NO: 5111 - RNA, 42 nt, synthetic construct
  misc_feature 1..42: note = Category: MG29-1 sgRNA targeting mouse TRAC
  misc_feature 1..42: note = Description: MG29-1-mTRAC-sgRNA-H7
  source 1..42: mol_type = other RNA
taatttctactgttgtagatttcatggatgcttaaaaaaata

SEQ ID NO: 5112 - RNA, 42 nt, synthetic construct
  misc_feature 1..42: note = Category: MG29-1 sgRNA targeting mouse TRAC
  misc_feature 1..42: note = Description: MG29-1-mTRAC-sgRNA-A8
  source 1..42: mol_type = other RNA
taatttctactgttgtagatttttacaacattctccaagaga

SEQ ID NO: 5113 - RNA, 42 nt, synthetic construct
  misc_feature 1..42: note = Category: MG29-1 sgRNA targeting mouse TRAC
  misc_feature 1..42: note = Description: MG29-1-mTRAC-sgRNA-B8
  source 1..42: mol_type = other RNA
taatttctactgttgtagattttacaacattctccaagagat

SEQ ID NO: 5114 - RNA, 42 nt, synthetic construct
  misc_feature 1..42: note = Category: MG29-1 sgRNA targeting mouse TRAC
  misc_feature 1..42: note = Description: MG29-1-mTRAC-sgRNA-C8
  source 1..42: mol_type = other RNA
taatttctactgttgtagatttacaacattctccaagagatt

SEQ ID NO: 5115 - RNA, 42 nt, synthetic construct
  misc_feature 1..42: note = Category: MG29-1 sgRNA targeting mouse TRAC
  misc_feature 1..42: note = Description: MG29-1-mTRAC-sgRNA-D8
  source 1..42: mol_type = other RNA
taatttctactgttgtagattacaacattctccaagagattt

SEQ ID NO: 5116 - RNA, 42 nt, synthetic construct
  misc_feature 1..42: note = Category: MG29-1 sgRNA targeting mouse TRAC
  misc_feature 1..42: note = Description: MG29-1-mTRAC-sgRNA-E8
  source 1..42: mol_type = other RNA
taatttctactgttgtagatacaacattctccaagagatttt

SEQ ID NO: 5117 - RNA, 42 nt, synthetic construct
  misc_feature 1..42: note = Category: MG29-1 sgRNA targeting mouse TRAC
  misc_feature 1..42: note = Description: MG29-1-mTRAC-sgRNA-F8
  source 1..42: mol_type = other RNA
taatttctactgttgtagatcaacattctccaagagatttta

SEQ ID NO: 5118 - RNA, 42 nt, synthetic construct
  misc_feature 1..42: note = Category: MG29-1 sgRNA targeting mouse TRAC
  misc_feature 1..42: note = Description: MG29-1-mTRAC-sgRNA-G8
  source 1..42: mol_type = other RNA
taatttctactgttgtagatacaggggagtctgccatggggg

SEQ ID NO: 5119 - RNA, 42 nt, synthetic construct
  misc_feature 1..42: note = Category: MG29-1 sgRNA targeting mouse TRAC
  misc_feature 1..42: note = Description: MG29-1-mTRAC-sgRNA-H8
  source 1..42: mol_type = other RNA
taatttctactgttgtagatcaggggagtctgccatggggga

SEQ ID NO: 5120 - RNA, 42 nt, synthetic construct
  misc_feature 1..42: note = Category: MG29-1 sgRNA targeting mouse TRAC
  misc_feature 1..42: note = Description: MG29-1-mTRAC-sgRNA-A9
  source 1..42: mol_type = other RNA
taatttctactgttgtagatttgtgaatggtcagcagcagtg

SEQ ID NO: 5121 - RNA, 42 nt, synthetic construct
  misc_feature 1..42: note = Category: MG29-1 sgRNA targeting mouse TRAC
  misc_feature 1..42: note = Description: MG29-1-mTRAC-sgRNA-B9
  source 1..42: mol_type = other RNA
taatttctactgttgtagattgtgaatggtcagcagcagtga

SEQ ID NO: 5122 - RNA, 42 nt, synthetic construct
  misc_feature 1..42: note = Category: MG29-1 sgRNA targeting mouse TRAC
  misc_feature 1..42: note = Description: MG29-1-mTRAC-sgRNA-C9
  source 1..42: mol_type = other RNA
taatttctactgttgtagatgtgaatggtcagcagcagtgag

SEQ ID NO: 5123 - RNA, 42 nt, synthetic construct
  misc_feature 1..42: note = Category: MG29-1 sgRNA targeting mouse TRAC
  misc_feature 1..42: note = Description: MG29-1-mTRAC-sgRNA-D9
  source 1..42: mol_type = other RNA
taatttctactgttgtagattgaatggtcagcagcagtgagg

SEQ ID NO: 5124 - RNA, 42 nt, synthetic construct
  misc_feature 1..42: note = Category: MG29-1 sgRNA targeting mouse TRAC
  misc_feature 1..42: note = Description: MG29-1-mTRAC-sgRNA-E9
  source 1..42: mol_type = other RNA
taatttctactgttgtagatggcttgaagaaggagcggaggg

SEQ ID NO: 5125 - RNA, 42 nt, synthetic construct
  misc_feature 1..42: note = Category: MG29-1 sgRNA targeting mouse TRAC
  misc_feature 1..42: note = Description: MG29-1-mTRAC-sgRNA-F9
  source 1..42: mol_type = other RNA
taatttctactgttgtagatgcttgaagaaggagcggagggg

SEQ ID NO: 5126 - DNA, 22 bp, unidentified
  misc_feature 1..22: note = Description of Unknown:MG29-1-mTRAC-target site-A1 sequence
  misc_feature 1..22: note = Category: DNA sequence of TRAC target site
  source 1..22: mol_type = genomic DNA; note = uncultivated organism sequence
actcccaaatcaatgtgccgaa

SEQ ID NO: 5127 - DNA, 22 bp, unidentified
  misc_feature 1..22: note = Description of Unknown:MG29-1-mTRAC-target site-B1 sequence
  misc_feature 1..22: note = Category: DNA sequence of TRAC target site
  source 1..22: mol_type = genomic DNA; note = uncultivated organism sequence
aagatatcttggcaggtgaagc

SEQ ID NO: 5128 - DNA, 22 bp, unidentified
  misc_feature 1..22: note = Description of Unknown:MG29-1-mTRAC-target site-C1 sequence
  misc_feature 1..22: note = Category: DNA sequence of TRAC target site
  source 1..22: mol_type = genomic DNA; note = uncultivated organism sequence
atgtccagcacagttttgtcag

SEQ ID NO: 5129 - DNA, 22 bp, unidentified
  misc_feature 1..22: note = Description of Unknown:MG29-1-mTRAC-target site-D1 sequence
  misc_feature 1..22: note = Category: DNA sequence of TRAC target site
  source 1..22: mol_type = genomic DNA; note = uncultivated organism sequence
gtcagtgatgaacgttccagat

SEQ ID NO: 5130 - DNA, 22 bp, unidentified
  misc_feature 1..22: note = Description of Unknown:MG29-1-mTRAC-target site-E1 sequence
  misc_feature 1..22: note = Category: DNA sequence of TRAC target site
  source 1..22: mol_type = genomic DNA; note = uncultivated organism sequence
tcagtgatgaacgttccagatt

SEQ ID NO: 5131 - DNA, 22 bp, unidentified
  misc_feature 1..22: note = Description of Unknown:MG29-1-mTRAC-target site-F1 sequence
  misc_feature 1..22: note = Category: DNA sequence of TRAC target site
  source 1..22: mol_type = genomic DNA; note = uncultivated organism sequence
cggcacattgatttgggagtca

SEQ ID NO: 5132 - DNA, 22 bp, unidentified
  misc_feature 1..22: note = Description of Unknown:MG29-1-mTRAC-target site-G1 sequence
  misc_feature 1..22: note = Category: DNA sequence of TRAC target site
  source 1..22: mol_type = genomic DNA; note = uncultivated organism sequence
ggcacattgatttgggagtcaa

SEQ ID NO: 5133 - DNA, 22 bp, unidentified
  misc_feature 1..22: note = Description of Unknown:MG29-1-mTRAC-target site-H1 sequence
  misc_feature 1..22: note = Category: DNA sequence of TRAC target site
  source 1..22: mol_type = genomic DNA; note = uncultivated organism sequence
ggagtcaaagtcggtgaacagg

SEQ ID NO: 5134 - DNA, 22 bp, unidentified
  misc_feature 1..22: note = Description of Unknown:MG29-1-mTRAC-target site-A2 sequence
  misc_feature 1..22: note = Category: DNA sequence of TRAC target site
  source 1..22: mol_type = genomic DNA; note = uncultivated organism sequence
aactggtacacagcaggttctg

SEQ ID NO: 5135 - DNA, 22 bp, unidentified
  misc_feature 1..22: note = Description of Unknown:MG29-1-mTRAC-target site-B2 sequence
  misc_feature 1..22: note = Category: DNA sequence of TRAC target site
  source 1..22: mol_type = genomic DNA; note = uncultivated organism sequence
actggtacacagcaggttctgg

SEQ ID NO: 5136 - DNA, 22 bp, unidentified
  misc_feature 1..22: note = Description of Unknown:MG29-1-mTRAC-target site-C2 sequence
  misc_feature 1..22: note = Category: DNA sequence of TRAC target site
  source 1..22: mol_type = genomic DNA; note = uncultivated organism sequence
ttttcccttttagacgttccct

SEQ ID NO: 5137 - DNA, 22 bp, unidentified
  misc_feature 1..22: note = Description of Unknown:MG29-1-mTRAC-target site-D2 sequence
  misc_feature 1..22: note = Category: DNA sequence of TRAC target site
  source 1..22: mol_type = genomic DNA; note = uncultivated organism sequence
cccttttagacgttccctgtga

SEQ ID NO: 5138 - DNA, 22 bp, unidentified
  misc_feature 1..22: note = Description of Unknown:MG29-1-mTRAC-target site-E2 sequence
  misc_feature 1..22: note = Category: DNA sequence of TRAC target site
  source 1..22: mol_type = genomic DNA; note = uncultivated organism sequence
ccttttagacgttccctgtgat

SEQ ID NO: 5139 - DNA, 22 bp, unidentified
  misc_feature 1..22: note = Description of Unknown:MG29-1-mTRAC-target site-F2 sequence
  misc_feature 1..22: note = Category: DNA sequence of TRAC target site
  source 1..22: mol_type = genomic DNA; note = uncultivated organism sequence
agacgttccctgtgatgccacg

SEQ ID NO: 5140 - DNA, 22 bp, unidentified
  misc_feature 1..22: note = Description of Unknown:MG29-1-mTRAC-target site-G2 sequence
  misc_feature 1..22: note = Category: DNA sequence of TRAC target site
  source 1..22: mol_type = genomic DNA; note = uncultivated organism sequence
gacgttccctgtgatgccacgt

SEQ ID NO: 5141 - DNA, 22 bp, unidentified
  misc_feature 1..22: note = Description of Unknown:MG29-1-mTRAC-target site-H2 sequence
  misc_feature 1..22: note = Category: DNA sequence of TRAC target site
  source 1..22: mol_type = genomic DNA; note = uncultivated organism sequence
aaagcttttctcagtcaacgtg

SEQ ID NO: 5142 - DNA, 22 bp, unidentified
  misc_feature 1..22: note = Description of Unknown:MG29-1-mTRAC-target site-A3 sequence
  misc_feature 1..22: note = Category: DNA sequence of TRAC target site
  source 1..22: mol_type = genomic DNA; note = uncultivated organism sequence
ctcagtcaacgtggcatcacag

SEQ ID NO: 5143 - DNA, 22 bp, unidentified
  misc_feature 1..22: note = Description of Unknown:MG29-1-mTRAC-target site-B3 sequence
  misc_feature 1..22: note = Category: DNA sequence of TRAC target site
  source 1..22: mol_type = genomic DNA; note = uncultivated organism sequence
tcagtcaacgtggcatcacagg

SEQ ID NO: 5144 - DNA, 22 bp, unidentified
  misc_feature 1..22: note = Description of Unknown:MG29-1-mTRAC-target site-C3 sequence
  misc_feature 1..22: note = Category: DNA sequence of TRAC target site
  source 1..22: mol_type = genomic DNA; note = uncultivated organism sequence
acagatatgaacctaaactttc

SEQ ID NO: 5145 - DNA, 22 bp, unidentified
  misc_feature 1..22: note = Description of Unknown:MG29-1-mTRAC-target site-D3 sequence
  misc_feature 1..22: note = Category: DNA sequence of TRAC target site
  source 1..22: mol_type = genomic DNA; note = uncultivated organism sequence
cagatatgaacctaaactttca

SEQ ID NO: 5146 - DNA, 22 bp, unidentified
  misc_feature 1..22: note = Description of Unknown:MG29-1-mTRAC-target site-E3 sequence
  misc_feature 1..22: note = Category: DNA sequence of TRAC target site
  source 1..22: mol_type = genomic DNA; note = uncultivated organism sequence
aaaacctgtcagttatgggact

SEQ ID NO: 5147 - DNA, 22 bp, unidentified
  misc_feature 1..22: note = Description of Unknown:MG29-1-mTRAC-target site-F3 sequence
  misc_feature 1..22: note = Category: DNA sequence of TRAC target site
  source 1..22: mol_type = genomic DNA; note = uncultivated organism sequence
acctgctcatgacgctgaggct

SEQ ID NO: 5148 - DNA, 22 bp, unidentified
  misc_feature 1..22: note = Description of Unknown:MG29-1-mTRAC-target site-G3 sequence
  misc_feature 1..22: note = Category: DNA sequence of TRAC target site
  source 1..22: mol_type = genomic DNA; note = uncultivated organism sequence
atgccttcttacctcaactgga

SEQ ID NO: 5149 - DNA, 22 bp, unidentified
  misc_feature 1..22: note = Description of Unknown:MG29-1-mTRAC-target site-H3 sequence
  misc_feature 1..22: note = Category: DNA sequence of TRAC target site
  source 1..22: mol_type = genomic DNA; note = uncultivated organism sequence
agcaggaggattcggagtccca

SEQ ID NO: 5150 - DNA, 22 bp, unidentified
  misc_feature 1..22: note = Description of Unknown:MG29-1-mTRAC-target site-A4 sequence
  misc_feature 1..22: note = Category: DNA sequence of TRAC target site
  source 1..22: mol_type = genomic DNA; note = uncultivated organism sequence
tgaggaaggttgctggagagct

SEQ ID NO: 5151 - DNA, 22 bp, unidentified
  misc_feature 1..22: note = Description of Unknown:MG29-1-mTRAC-target site-B4 sequence
  misc_feature 1..22: note = Category: DNA sequence of TRAC target site
  source 1..22: mol_type = genomic DNA; note = uncultivated organism sequence
ttgttttttttttttttgcggg

SEQ ID NO: 5152 - DNA, 22 bp, unidentified
  misc_feature 1..22: note = Description of Unknown:MG29-1-mTRAC-target site-C4 sequence
  misc_feature 1..22: note = Category: DNA sequence of TRAC target site
  source 1..22: mol_type = genomic DNA; note = uncultivated organism sequence
tgttttttttttttttgcgggt

SEQ ID NO: 5153 - DNA, 22 bp, unidentified
  misc_feature 1..22: note = Description of Unknown:MG29-1-mTRAC-target site-D4 sequence
  misc_feature 1..22: note = Category: DNA sequence of TRAC target site
  source 1..22: mol_type = genomic DNA; note = uncultivated organism sequence
gttttttttttttttgcgggtt

SEQ ID NO: 5154 - DNA, 22 bp, unidentified
  misc_feature 1..22: note = Description of Unknown:MG29-1-mTRAC-target site-E4 sequence
  misc_feature 1..22: note = Category: DNA sequence of TRAC target site
  source 1..22: mol_type = genomic DNA; note = uncultivated organism sequence
ttttttttttttttgcgggttt

SEQ ID NO: 5155 - DNA, 22 bp, unidentified
  misc_feature 1..22: note = Description of Unknown:MG29-1-mTRAC-target site-F4 sequence
  misc_feature 1..22: note = Category: DNA sequence of TRAC target site
  source 1..22: mol_type = genomic DNA; note = uncultivated organism sequence
ttttttttttgcgggtttattt

SEQ ID NO: 5156 - DNA, 22 bp, unidentified
  misc_feature 1..22: note = Description of Unknown:MG29-1-mTRAC-target site-G4 sequence
  misc_feature 1..22: note = Category: DNA sequence of TRAC target site
  source 1..22: mol_type = genomic DNA; note = uncultivated organism sequence
tttttttttgcgggtttatttt

SEQ ID NO: 5157 - DNA, 22 bp, unidentified
  misc_feature 1..22: note = Description of Unknown:MG29-1-mTRAC-target site-H4 sequence
  misc_feature 1..22: note = Category: DNA sequence of TRAC target site
  source 1..22: mol_type = genomic DNA; note = uncultivated organism sequence
ttttttttgcgggtttattttt

SEQ ID NO: 5158 - DNA, 22 bp, unidentified
  misc_feature 1..22: note = Description of Unknown:MG29-1-mTRAC-target site-A5 sequence
  misc_feature 1..22: note = Category: DNA sequence of TRAC target site
  source 1..22: mol_type = genomic DNA; note = uncultivated organism sequence
tttttttgcgggtttatttttt

SEQ ID NO: 5159 - DNA, 22 bp, unidentified
  misc_feature 1..22: note = Description of Unknown:MG29-1-mTRAC-target site-B5 sequence
  misc_feature 1..22: note = Category: DNA sequence of TRAC target site
  source 1..22: mol_type = genomic DNA; note = uncultivated organism sequence
ttttttgcgggtttattttttt

SEQ ID NO: 5160 - DNA, 22 bp, unidentified
  misc_feature 1..22: note = Description of Unknown:MG29-1-mTRAC-target site-C5 sequence
  misc_feature 1..22: note = Category: DNA sequence of TRAC target site
  source 1..22: mol_type = genomic DNA; note = uncultivated organism sequence
tttttgcgggtttattttttta

SEQ ID NO: 5161 - DNA, 22 bp, unidentified
  misc_feature 1..22: note = Description of Unknown:MG29-1-mTRAC-target site-D5 sequence
  misc_feature 1..22: note = Category: DNA sequence of TRAC target site
  source 1..22: mol_type = genomic DNA; note = uncultivated organism sequence
ttttgcgggtttatttttttaa

SEQ ID NO: 5162 - DNA, 22 bp, unidentified
  misc_feature 1..22: note = Description of Unknown:MG29-1-mTRAC-target site-E5 sequence
  misc_feature 1..22: note = Category: DNA sequence of TRAC target site
  source 1..22: mol_type = genomic DNA; note = uncultivated organism sequence
tttgcgggtttatttttttaag

SEQ ID NO: 5163 - DNA, 22 bp, unidentified
  misc_feature 1..22: note = Description of Unknown:MG29-1-mTRAC-target site-F5 sequence
  misc_feature 1..22: note = Category: DNA sequence of TRAC target site
  source 1..22: mol_type = genomic DNA; note = uncultivated organism sequence
ttgcgggtttatttttttaagc

SEQ ID NO: 5164 - DNA, 22 bp, unidentified
  misc_feature 1..22: note = Description of Unknown:MG29-1-mTRAC-target site-G5 sequence
  misc_feature 1..22: note = Category: DNA sequence of TRAC target site
  source 1..22: mol_type = genomic DNA; note = uncultivated organism sequence
tgcgggtttatttttttaagca

SEQ ID NO: 5165 - DNA, 22 bp, unidentified
  misc_feature 1..22: note = Description of Unknown:MG29-1-mTRAC-target site-H5 sequence
  misc_feature 1..22: note = Category: DNA sequence of TRAC target site
  source 1..22: mol_type = genomic DNA; note = uncultivated organism sequence
gcgggtttatttttttaagcat

SEQ ID NO: 5166 - DNA, 22 bp, unidentified
  misc_feature 1..22: note = Description of Unknown:MG29-1-mTRAC-target site-A6 sequence
  misc_feature 1..22: note = Category: DNA sequence of TRAC target site
  source 1..22: mol_type = genomic DNA; note = uncultivated organism sequence
cgggtttatttttttaagcatc

SEQ ID NO: 5167 - DNA, 22 bp, unidentified
  misc_feature 1..22: note = Description of Unknown:MG29-1-mTRAC-target site-B6 sequence
  misc_feature 1..22: note = Category: DNA sequence of TRAC target site
  source 1..22: mol_type = genomic DNA; note = uncultivated organism sequence
tttttttaagcatccatgaaga

SEQ ID NO: 5168 - DNA, 22 bp, unidentified
  misc_feature 1..22: note = Description of Unknown:MG29-1-mTRAC-target site-C6 sequence
  misc_feature 1..22: note = Category: DNA sequence of TRAC target site
  source 1..22: mol_type = genomic DNA; note = uncultivated organism sequence
tttaagcatccatgaagaaatg

SEQ ID NO: 5169 - DNA, 22 bp, unidentified
  misc_feature 1..22: note = Description of Unknown:MG29-1-mTRAC-target site-D6 sequence
  misc_feature 1..22: note = Category: DNA sequence of TRAC target site
  source 1..22: mol_type = genomic DNA; note = uncultivated organism sequence
ttaagcatccatgaagaaatgc

SEQ ID NO: 5170 - DNA, 22 bp, unidentified
  misc_feature 1..22: note = Description of Unknown:MG29-1-mTRAC-target site-E6 sequence
  misc_feature 1..22: note = Category: DNA sequence of TRAC target site
  source 1..22: mol_type = genomic DNA; note = uncultivated organism sequence
taagcatccatgaagaaatgca

SEQ ID NO: 5171 - DNA, 22 bp, unidentified
  misc_feature 1..22: note = Description of Unknown:MG29-1-mTRAC-target site-F6 sequence
  misc_feature 1..22: note = Category: DNA sequence of TRAC target site
  source 1..22: mol_type = genomic DNA; note = uncultivated organism sequence
aagcatccatgaagaaatgcat

SEQ ID NO: 5172 - DNA, 22 bp, unidentified
  misc_feature 1..22: note = Description of Unknown:MG29-1-mTRAC-target site-G6 sequence
  misc_feature 1..22: note = Category: DNA sequence of TRAC target site
  source 1..22: mol_type = genomic DNA; note = uncultivated organism sequence
agcatccatgaagaaatgcata

SEQ ID NO: 5173 - DNA, 22 bp, unidentified
  misc_feature 1..22: note = Description of Unknown:MG29-1-mTRAC-target site-H6 sequence
  misc_feature 1..22: note = Category: DNA sequence of TRAC target site
  source 1..22: mol_type = genomic DNA; note = uncultivated organism sequence
atcaaggtgtagaaattatctc

SEQ ID NO: 5174 - DNA, 22 bp, unidentified
  misc_feature 1..22: note = Description of Unknown:MG29-1-mTRAC-target site-A7 sequence
  misc_feature 1..22: note = Category: DNA sequence of TRAC target site
  source 1..22: mol_type = genomic DNA; note = uncultivated organism sequence
ggtttttctgaatcacctttaa

SEQ ID NO: 5175 - DNA, 22 bp, unidentified
  misc_feature 1..22: note = Description of Unknown:MG29-1-mTRAC-target site-B7 sequence
  misc_feature 1..22: note = Category: DNA sequence of TRAC target site
  source 1..22: mol_type = genomic DNA; note = uncultivated organism sequence
gtttttctgaatcacctttaat

SEQ ID NO: 5176 - DNA, 22 bp, unidentified
  misc_feature 1..22: note = Description of Unknown:MG29-1-mTRAC-target site-C7 sequence
  misc_feature 1..22: note = Category: DNA sequence of TRAC target site
  source 1..22: mol_type = genomic DNA; note = uncultivated organism sequence
tctgaatcacctttaatgatgt

SEQ ID NO: 5177 - DNA, 22 bp, unidentified
  misc_feature 1..22: note = Description of Unknown:MG29-1-mTRAC-target site-D7 sequence
  misc_feature 1..22: note = Category: DNA sequence of TRAC target site
  source 1..22: mol_type = genomic DNA; note = uncultivated organism sequence
ctgaatcacctttaatgatgtc

SEQ ID NO: 5178 - DNA, 22 bp, unidentified
  misc_feature 1..22: note = Description of Unknown:MG29-1-mTRAC-target site-E7 sequence
  misc_feature 1..22: note = Category: DNA sequence of TRAC target site
  source 1..22: mol_type = genomic DNA; note = uncultivated organism sequence
tgaatcacctttaatgatgtca

SEQ ID NO: 5179 - DNA, 22 bp, unidentified
  misc_feature 1..22: note = Description of Unknown:MG29-1-mTRAC-target site-F7 sequence
  misc_feature 1..22: note = Category: DNA sequence of TRAC target site
  source 1..22: mol_type = genomic DNA; note = uncultivated organism sequence
atgatgtcatggacagcagaat

SEQ ID NO: 5180 - DNA, 22 bp, unidentified
  misc_feature 1..22: note = Description of Unknown:MG29-1-mTRAC-target site-G7 sequence
  misc_feature 1..22: note = Category: DNA sequence of TRAC target site
  source 1..22: mol_type = genomic DNA; note = uncultivated organism sequence
tacaccttgatgaaagagtaat

SEQ ID NO: 5181 - DNA, 22 bp, unidentified
  misc_feature 1..22: note = Description of Unknown:MG29-1-mTRAC-target site-H7 sequence
  misc_feature 1..22: note = Category: DNA sequence of TRAC target site
  source 1..22: mol_type = genomic DNA; note = uncultivated organism sequence
ttcatggatgcttaaaaaaata

SEQ ID NO: 5182 - DNA, 22 bp, unidentified
  misc_feature 1..22: note = Description of Unknown:MG29-1-mTRAC-target site-A8 sequence
  misc_feature 1..22: note = Category: DNA sequence of TRAC target site
  source 1..22: mol_type = genomic DNA; note = uncultivated organism sequence
ttttacaacattctccaagaga

SEQ ID NO: 5183 - DNA, 22 bp, unidentified
  misc_feature 1..22: note = Description of Unknown:MG29-1-mTRAC-target site-B8 sequence
  misc_feature 1..22: note = Category: DNA sequence of TRAC target site
  source 1..22: mol_type = genomic DNA; note = uncultivated organism sequence
tttacaacattctccaagagat

SEQ ID NO: 5184 - DNA, 22 bp, unidentified
  misc_feature 1..22: note = Description of Unknown:MG29-1-mTRAC-target site-C8 sequence
  misc_feature 1..22: note = Category: DNA sequence of TRAC target site
  source 1..22: mol_type = genomic DNA; note = uncultivated organism sequence
ttacaacattctccaagagatt

SEQ ID NO: 5185 - DNA, 22 bp, unidentified
  misc_feature 1..22: note = Description of Unknown:MG29-1-mTRAC-target site-D8 sequence
  misc_feature 1..22: note = Category: DNA sequence of TRAC target site
  source 1..22: mol_type = genomic DNA; note = uncultivated organism sequence
tacaacattctccaagagattt

SEQ ID NO: 5186 - DNA, 22 bp, unidentified
  misc_feature 1..22: note = Description of Unknown:MG29-1-mTRAC-target site-E8 sequence
  misc_feature 1..22: note = Category: DNA sequence of TRAC target site
  source 1..22: mol_type = genomic DNA; note = uncultivated organism sequence
acaacattctccaagagatttt

SEQ ID NO: 5187 - DNA, 22 bp, unidentified
  misc_feature 1..22: note = Description of Unknown:MG29-1-mTRAC-target site-F8 sequence
  misc_feature 1..22: note = Category: DNA sequence of TRAC target site
  source 1..22: mol_type = genomic DNA; note = uncultivated organism sequence
caacattctccaagagatttta

SEQ ID NO: 5188 - DNA, 22 bp, unidentified
  misc_feature 1..22: note = Description of Unknown:MG29-1-mTRAC-target site-G8 sequence
  misc_feature 1..22: note = Category: DNA sequence of TRAC target site
  source 1..22: mol_type = genomic DNA; note = uncultivated organism sequence
acaggggagtctgccatggggg

SEQ ID NO: 5189 - DNA, 22 bp, unidentified
  misc_feature 1..22: note = Description of Unknown:MG29-1-mTRAC-target site-H8 sequence
  misc_feature 1..22: note = Category: DNA sequence of TRAC target site
  source 1..22: mol_type = genomic DNA; note = uncultivated organism sequence
caggggagtctgccatggggga

SEQ ID NO: 5190 - DNA, 22 bp, unidentified
  misc_feature 1..22: note = Description of Unknown:MG29-1-mTRAC-target site-A9 sequence
  misc_feature 1..22: note = Category: DNA sequence of TRAC target site
  source 1..22: mol_type = genomic DNA; note = uncultivated organism sequence
ttgtgaatggtcagcagcagtg

SEQ ID NO: 5191 - DNA, 22 bp, unidentified
  misc_feature 1..22: note = Description of Unknown:MG29-1-mTRAC-target site-B9 sequence
  misc_feature 1..22: note = Category: DNA sequence of TRAC target site
  source 1..22: mol_type = genomic DNA; note = uncultivated organism sequence
tgtgaatggtcagcagcagtga

SEQ ID NO: 5192 - DNA, 22 bp, unidentified
  misc_feature 1..22: note = Description of Unknown:MG29-1-mTRAC-target site-C9 sequence
  misc_feature 1..22: note = Category: DNA sequence of TRAC target site
  source 1..22: mol_type = genomic DNA; note = uncultivated organism sequence
gtgaatggtcagcagcagtgag

SEQ ID NO: 5193 - DNA, 22 bp, unidentified
  misc_feature 1..22: note = Description of Unknown:MG29-1-mTRAC-target site-D9 sequence
  misc_feature 1..22: note = Category: DNA sequence of TRAC target site
  source 1..22: mol_type = genomic DNA; note = uncultivated organism sequence
tgaatggtcagcagcagtgagg

SEQ ID NO: 5194 - DNA, 22 bp, unidentified
  misc_feature 1..22: note = Description of Unknown:MG29-1-mTRAC-target site-E9 sequence
  misc_feature 1..22: note = Category: DNA sequence of TRAC target site
  source 1..22: mol_type = genomic DNA; note = uncultivated organism sequence
ggcttgaagaaggagcggaggg

SEQ ID NO: 5195 - DNA, 22 bp, unidentified
  misc_feature 1..22: note = Description of Unknown:MG29-1-mTRAC-target site-F9 sequence
  misc_feature 1..22: note = Category: DNA sequence of TRAC target site
  source 1..22: mol_type = genomic DNA; note = uncultivated organism sequence
gcttgaagaaggagcggagggg

SEQ ID NO: 5196 - RNA, 42 nt, synthetic construct
  misc_feature 1..42: note = Category: MG29-1 sgRNA targeting mouse TRBC1
  misc_feature 1..42: note = Description: MG29-1-mTRBC1-sgRNA-A1
  source 1..42: mol_type = other RNA
taatttctactgttgtagatctttccagaggatctgagaaat

SEQ ID NO: 5197 - RNA, 42 nt, synthetic construct
  misc_feature 1..42: note = Category: MG29-1 sgRNA targeting mouse TRBC1
  misc_feature 1..42: note = Description: MG29-1-mTRBC1-sgRNA-B1
  source 1..42: mol_type = other RNA
taatttctactgttgtagatcagaggatctgagaaatgtgac

SEQ ID NO: 5198 - RNA, 42 nt, synthetic construct
  misc_feature 1..42: note = Category: MG29-1 sgRNA targeting mouse TRBC1
  misc_feature 1..42: note = Description: MG29-1-mTRBC1-sgRNA-C1
  source 1..42: mol_type = other RNA
taatttctactgttgtagatagccatcaaaagcagagattgc

SEQ ID NO: 5199 - RNA, 42 nt, synthetic construct
  misc_feature 1..42: note = Category: MG29-1 sgRNA targeting mouse TRBC1
  misc_feature 1..42: note = Description: MG29-1-mTRBC1-sgRNA-D1
  source 1..42: mol_type = other RNA
taatttctactgttgtagatagaggaggacaagtggccagag

SEQ ID NO: 5200 - RNA, 42 nt, synthetic construct
  misc_feature 1..42: note = Category: MG29-1 sgRNA targeting mouse TRBC1
  misc_feature 1..42: note = Description: MG29-1-mTRBC1-sgRNA-E1
  source 1..42: mol_type = other RNA
taatttctactgttgtagatggtgagccctctggccacttgt

SEQ ID NO: 5201 - RNA, 42 nt, synthetic construct
  misc_feature 1..42: note = Category: MG29-1 sgRNA targeting mouse TRBC1
  misc_feature 1..42: note = Description: MG29-1-mTRBC1-sgRNA-F1
  source 1..42: mol_type = other RNA
taatttctactgttgtagatgtttgtttgcaatctctgcttt

SEQ ID NO: 5202 - RNA, 42 nt, synthetic construct
  misc_feature 1..42: note = Category: MG29-1 sgRNA targeting mouse TRBC1
  misc_feature 1..42: note = Description: MG29-1-mTRBC1-sgRNA-G1
  source 1..42: mol_type = other RNA
taatttctactgttgtagattttgtttgcaatctctgctttt

SEQ ID NO: 5203 - RNA, 42 nt, synthetic construct
  misc_feature 1..42: note = Category: MG29-1 sgRNA targeting mouse TRBC1
  misc_feature 1..42: note = Description: MG29-1-mTRBC1-sgRNA-H1
  source 1..42: mol_type = other RNA
taatttctactgttgtagattttgcaatctctgcttttgatg

SEQ ID NO: 5204 - RNA, 42 nt, synthetic construct
  misc_feature 1..42: note = Category: MG29-1 sgRNA targeting mouse TRBC1
  misc_feature 1..42: note = Description: MG29-1-mTRBC1-sgRNA-A2
  source 1..42: mol_type = other RNA
taatttctactgttgtagatcaatctctgcttttgatggctc

SEQ ID NO: 5205 - RNA, 42 nt, synthetic construct
  misc_feature 1..42: note = Category: MG29-1 sgRNA targeting mouse TRBC1
  misc_feature 1..42: note = Description: MG29-1-mTRBC1-sgRNA-B2
  source 1..42: mol_type = other RNA
taatttctactgttgtagatgatggctcaaacaaggagacct

SEQ ID NO: 5206 - RNA, 42 nt, synthetic construct
  misc_feature 1..42: note = Category: MG29-1 sgRNA targeting mouse TRBC1
  misc_feature 1..42: note = Description: MG29-1-mTRBC1-sgRNA-C2
  source 1..42: mol_type = other RNA
taatttctactgttgtagatatggctcaaacaaggagacctt

SEQ ID NO: 5207 - RNA, 42 nt, synthetic construct
  misc_feature 1..42: note = Category: MG29-1 sgRNA targeting mouse TRBC1
  misc_feature 1..42: note = Description: MG29-1-mTRBC1-sgRNA-D2
  source 1..42: mol_type = other RNA
taatttctactgttgtagattctcttctttcagactgtggga

SEQ ID NO: 5208 - RNA, 42 nt, synthetic construct
  misc_feature 1..42: note = Category: MG29-1 sgRNA targeting mouse TRBC1
  misc_feature 1..42: note = Description: MG29-1-mTRBC1-sgRNA-E2
  source 1..42: mol_type = other RNA
taatttctactgttgtagatctgtcaacagcatcctatcaac

SEQ ID NO: 5209 - RNA, 42 nt, synthetic construct
  misc_feature 1..42: note = Category: MG29-1 sgRNA targeting mouse TRBC1
  misc_feature 1..42: note = Description: MG29-1-mTRBC1-sgRNA-F2
  source 1..42: mol_type = other RNA
taatttctactgttgtagattgtcaacagcatcctatcaaca

SEQ ID NO: 5210 - RNA, 42 nt, synthetic construct
  misc_feature 1..42: note = Category: MG29-1 sgRNA targeting mouse TRBC1
  misc_feature 1..42: note = Description: MG29-1-mTRBC1-sgRNA-G2
  source 1..42: mol_type = other RNA
taatttctactgttgtagatcctagcaggatctcatagagga

SEQ ID NO: 5211 - DNA, 22 bp, unidentified
  misc_feature 1..22: note = Description of Unknown:MG29-1-mTRBC1-target site-A1 sequence
  misc_feature 1..22: note = Category: DNA sequence of TRBC1 target site
  source 1..22: mol_type = genomic DNA; note = uncultivated organism sequence
ctttccagaggatctgagaaat

SEQ ID NO: 5212 - DNA, 22 bp, unidentified
  misc_feature 1..22: note = Description of Unknown:MG29-1-mTRBC1-target site-B1 sequence
  misc_feature 1..22: note = Category: DNA sequence of TRBC1 target site
  source 1..22: mol_type = genomic DNA; note = uncultivated organism sequence
cagaggatctgagaaatgtgac

SEQ ID NO: 5213 - DNA, 22 bp, unidentified
  misc_feature 1..22: note = Description of Unknown:MG29-1-mTRBC1-target site-C1 sequence
  misc_feature 1..22: note = Category: DNA sequence of TRBC1 target site
  source 1..22: mol_type = genomic DNA; note = uncultivated organism sequence
agccatcaaaagcagagattgc

SEQ ID NO: 5214 - DNA, 22 bp, unidentified
  misc_feature 1..22: note = Description of Unknown:MG29-1-mTRBC1-target site-D1 sequence
  misc_feature 1..22: note = Category: DNA sequence of TRBC1 target site
  source 1..22: mol_type = genomic DNA; note = uncultivated organism sequence
agaggaggacaagtggccagag

SEQ ID NO: 5215 - DNA, 22 bp, unidentified
  misc_feature 1..22: note = Description of Unknown:MG29-1-mTRBC1-target site-E1 sequence
  misc_feature 1..22: note = Category: DNA sequence of TRBC1 target site
  source 1..22: mol_type = genomic DNA; note = uncultivated organism sequence
ggtgagccctctggccacttgt

SEQ ID NO: 5216 - DNA, 22 bp, unidentified
  misc_feature 1..22: note = Description of Unknown:MG29-1-mTRBC1-target site-F1 sequence
  misc_feature 1..22: note = Category: DNA sequence of TRBC1 target site
  source 1..22: mol_type = genomic DNA; note = uncultivated organism sequence
gtttgtttgcaatctctgcttt

SEQ ID NO: 5217 - DNA, 22 bp, unidentified
  misc_feature 1..22: note = Description of Unknown:MG29-1-mTRBC1-target site-G1 sequence
  misc_feature 1..22: note = Category: DNA sequence of TRBC1 target site
  source 1..22: mol_type = genomic DNA; note = uncultivated organism sequence
tttgtttgcaatctctgctttt

SEQ ID NO: 5218 - DNA, 22 bp, unidentified
  misc_feature 1..22: note = Description of Unknown:MG29-1-mTRBC1-target site-H1 sequence
  misc_feature 1..22: note = Category: DNA sequence of TRBC1 target site
  source 1..22: mol_type = genomic DNA; note = uncultivated organism sequence
tttgcaatctctgcttttgatg

SEQ ID NO: 5219 - DNA, 22 bp, unidentified
  misc_feature 1..22: note = Description of Unknown:MG29-1-mTRBC1-target site-A2 sequence
  misc_feature 1..22: note = Category: DNA sequence of TRBC1 target site
  source 1..22: mol_type = genomic DNA; note = uncultivated organism sequence
caatctctgcttttgatggctc

SEQ ID NO: 5220 - DNA, 22 bp, unidentified
  misc_feature 1..22: note = Description of Unknown:MG29-1-mTRBC1-target site-B2 sequence
  misc_feature 1..22: note = Category: DNA sequence of TRBC1 target site
  source 1..22: mol_type = genomic DNA; note = uncultivated organism sequence
gatggctcaaacaaggagacct

SEQ ID NO: 5221 - DNA, 22 bp, unidentified
  misc_feature 1..22: note = Description of Unknown:MG29-1-mTRBC1-target site-C2 sequence
  misc_feature 1..22: note = Category: DNA sequence of TRBC1 target site
  source 1..22: mol_type = genomic DNA; note = uncultivated organism sequence
atggctcaaacaaggagacctt

SEQ ID NO: 5222 - DNA, 22 bp, unidentified
  misc_feature 1..22: note = Description of Unknown:MG29-1-mTRBC1-target site-D2 sequence
  misc_feature 1..22: note = Category: DNA sequence of TRBC1 target site
  source 1..22: mol_type = genomic DNA; note = uncultivated organism sequence
tctcttctttcagactgtggga

SEQ ID NO: 5223 - DNA, 22 bp, unidentified
  misc_feature 1..22: note = Description of Unknown:MG29-1-mTRBC1-target site-E2 sequence
  misc_feature 1..22: note = Category: DNA sequence of TRBC1 target site
  source 1..22: mol_type = genomic DNA; note = uncultivated organism sequence
ctgtcaacagcatcctatcaac

SEQ ID NO: 5224 - DNA, 22 bp, unidentified
  misc_feature 1..22: note = Description of Unknown:MG29-1-mTRBC1-target site-F2 sequence
  misc_feature 1..22: note = Category: DNA sequence of TRBC1 target site
  source 1..22: mol_type = genomic DNA; note = uncultivated organism sequence
tgtcaacagcatcctatcaaca

SEQ ID NO: 5225 - DNA, 22 bp, unidentified
  misc_feature 1..22: note = Description of Unknown:MG29-1-mTRBC1-target site-G2 sequence
  misc_feature 1..22: note = Category: DNA sequence of TRBC1 target site
  source 1..22: mol_type = genomic DNA; note = uncultivated organism sequence
cctagcaggatctcatagagga

SEQ ID NO: 5226 - RNA, 42 nt, synthetic construct; identical to SEQ ID NO: 5196
  misc_feature 1..42: note = Category: MG29-1 sgRNA targeting mouse TRBC2
  misc_feature 1..42: note = Description: MG29-1-mTRBC2-sgRNA-A1
  source 1..42: mol_type = other RNA

SEQ ID NO: 5227 - RNA, 42 nt, synthetic construct; identical to SEQ ID NO: 5197
  misc_feature 1..42: note = Category: MG29-1 sgRNA targeting mouse TRBC2
  misc_feature 1..42: note = Description: MG29-1-mTRBC2-sgRNA-B1
  source 1..42: mol_type = other RNA

SEQ ID NO: 5228 - RNA, 42 nt, synthetic construct; identical to SEQ ID NO: 5198
  misc_feature 1..42: note = Category: MG29-1 sgRNA targeting mouse TRBC2
  misc_feature 1..42: note = Description: MG29-1-mTRBC2-sgRNA-C1
  source 1..42: mol_type = other RNA

SEQ ID NO: 5229 - RNA, 42 nt, synthetic construct; identical to SEQ ID NO: 5199
  misc_feature 1..42: note = Category: MG29-1 sgRNA targeting mouse TRBC2
  misc_feature 1..42: note = Description: MG29-1-mTRBC2-sgRNA-D1
  source 1..42: mol_type = other RNA

SEQ ID NO: 5230 - RNA, 42 nt, synthetic construct
  misc_feature 1..42: note = Category: MG29-1 sgRNA targeting mouse TRBC2
  misc_feature 1..42: note = Description: MG29-1-mTRBC2-sgRNA-E1
  source 1..42: mol_type = other RNA
taatttctactgttgtagatctcatgagctccgcacttacct

SEQ ID NO: 5231 - RNA, 42 nt, synthetic construct; identical to SEQ ID NO: 5200
  misc_feature 1..42: note = Category: MG29-1 sgRNA targeting mouse TRBC2
  misc_feature 1..42: note = Description: MG29-1-mTRBC2-sgRNA-F1
  source 1..42: mol_type = other RNA

SEQ ID NO: 5232 - RNA, 42 nt, synthetic construct
  misc_feature 1..42: note = Category: MG29-1 sgRNA targeting mouse TRBC2
  misc_feature 1..42: note = Description: MG29-1-mTRBC2-sgRNA-G1
  source 1..42: mol_type = other RNA
taatttctactgttgtagatgaggattgtgccagaaggtagc

SEQ ID NO: 5233 - RNA, 42 nt, synthetic construct; identical to SEQ ID NO: 5201
  misc_feature 1..42: note = Category: MG29-1 sgRNA targeting mouse TRBC2
  misc_feature 1..42: note = Description: MG29-1-mTRBC2-sgRNA-H1
  source 1..42: mol_type = other RNA

SEQ ID NO: 5234 - RNA, 42 nt, synthetic construct; identical to SEQ ID NO: 5202
  misc_feature 1..42: note = Category: MG29-1 sgRNA targeting mouse TRBC2
  misc_feature 1..42: note = Description: MG29-1-mTRBC2-sgRNA-A2
  source 1..42: mol_type = other RNA

SEQ ID NO: 5235 - RNA, 42 nt, synthetic construct; identical to SEQ ID NO: 5203
  misc_feature 1..42: note = Category: MG29-1 sgRNA targeting mouse TRBC2
  misc_feature 1..42: note = Description: MG29-1-mTRBC2-sgRNA-B2
  source 1..42: mol_type = other RNA

SEQ ID NO: 5236 - RNA, 42 nt, synthetic construct; identical to SEQ ID NO: 5204
  misc_feature 1..42: note = Category: MG29-1 sgRNA targeting mouse TRBC2
  misc_feature 1..42: note = Description: MG29-1-mTRBC2-sgRNA-C2
  source 1..42: mol_type = other RNA

SEQ ID NO: 5237 - RNA, 42 nt, synthetic construct; identical to SEQ ID NO: 5205
  misc_feature 1..42: note = Category: MG29-1 sgRNA targeting mouse TRBC2
  misc_feature 1..42: note = Description: MG29-1-mTRBC2-sgRNA-D2
  source 1..42: mol_type = other RNA

SEQ ID NO: 5238 - RNA, 42 nt, synthetic construct; identical to SEQ ID NO: 5206
  misc_feature 1..42: note = Category: MG29-1 sgRNA targeting mouse TRBC2
  misc_feature 1..42: note = Description: MG29-1-mTRBC2-sgRNA-E2
  source 1..42: mol_type = other RNA

SEQ ID NO: 5239 - RNA, 42 nt, synthetic construct
  misc_feature 1..42: note = Category: MG29-1 sgRNA targeting mouse TRBC2
  misc_feature 1..42: note = Description: MG29-1-mTRBC2-sgRNA-F2
  source 1..42: mol_type = other RNA
taatttctactgttgtagatctccctctcctttctttcagac

SEQ ID NO: 5240 - RNA, 42 nt, synthetic construct
  misc_feature 1..42: note = Category: MG29-1 sgRNA targeting mouse TRBC2
  misc_feature 1..42: note = Description: MG29-1-mTRBC2-sgRNA-G2
  source 1..42: mol_type = other RNA
taatttctactgttgtagattccctctcctttctttcagact

SEQ ID NO: 5241 - RNA, 42 nt, synthetic construct
  misc_feature 1..42: note = Category: MG29-1 sgRNA targeting mouse TRBC2
  misc_feature 1..42: note = Description: MG29-1-mTRBC2-sgRNA-H2
  source 1..42: mol_type = other RNA
taatttctactgttgtagattttcagactgtggaatcacttc

SEQ ID NO: 5242 - RNA, 42 nt, synthetic construct
  misc_feature 1..42: note = Category: MG29-1 sgRNA targeting mouse TRBC2
  misc_feature 1..42: note = Description: MG29-1-mTRBC2-sgRNA-A3
  source 1..42: mol_type = other RNA
taatttctactgttgtagatagactgtggaatcacttcaggt

SEQ ID NO: 5243 - RNA, 42 nt, synthetic construct
  misc_feature 1..42: note = Category: MG29-1 sgRNA targeting mouse TRBC2
  misc_feature 1..42: note = Description: MG29-1-mTRBC2-sgRNA-B3
  source 1..42: mol_type = other RNA
taatttctactgttgtagatctgtcaacagcatcctatcatc

SEQ ID NO: 5244 - RNA, 42 nt, synthetic construct
  misc_feature 1..42: note = Category: MG29-1 sgRNA targeting mouse TRBC2
  misc_feature 1..42: note = Description: MG29-1-mTRBC2-sgRNA-C3
  source 1..42: mol_type = other RNA
taatttctactgttgtagattccatcctaccattcttaccat

SEQ ID NO: 5245 - RNA, 42 nt, synthetic construct
  misc_feature 1..42: note = Category: MG29-1 sgRNA targeting mouse TRBC2
  misc_feature 1..42: note = Description: MG29-1-mTRBC2-sgRNA-D3
  source 1..42: mol_type = other RNA
taatttctactgttgtagattcaggtcaagaaaaaaaattcc

SEQ ID NO: 5246 - RNA, 42 nt, synthetic construct
  misc_feature 1..42: note = Category: MG29-1 sgRNA targeting mouse TRBC2
  misc_feature 1..42: note = Description: MG29-1-mTRBC2-sgRNA-E3
  source 1..42: mol_type = other RNA
taatttctactgttgtagattctcaggaattttttttcttga

SEQ ID NO: 5247 - DNA, 22 bp, unidentified
  misc_feature 1..22: note = Description of Unknown:MG29-1-mTRBC2-target site-A1 sequence
  misc_feature 1..22: note = Category: DNA sequence of TRBC2 target site
  source 1..22: mol_type = genomic DNA; note = uncultivated organism sequence
ctttccagaggatctgagaaat

SEQ ID NO: 5248 - DNA, 22 bp, unidentified
  misc_feature 1..22: note = Description of Unknown:MG29-1-mTRBC2-target site-B1 sequence
  misc_feature 1..22: note = Category: DNA sequence of TRBC2 target site
  source 1..22: mol_type = genomic DNA; note = uncultivated organism sequence
cagaggatctgagaaatgtgac

SEQ ID NO: 5249 - DNA, 22 bp, unidentified
  misc_feature 1..22: note = Description of Unknown:MG29-1-mTRBC2-target site-C1 sequence
  misc_feature 1..22: note = Category: DNA sequence of TRBC2 target site
  source 1..22: mol_type = genomic DNA; note = uncultivated organism sequence
agccatcaaaagcagagattgc

SEQ ID NO: 5250 - DNA, 22 bp, unidentified
  misc_feature 1..22: note = Description of Unknown:MG29-1-mTRBC2-target site-D1 sequence
  misc_feature 1..22: note = Category: DNA sequence of TRBC2 target site
  source 1..22: mol_type = genomic DNA; note = uncultivated organism sequence
agaggaggacaagtggccagag

SEQ ID NO: 5251 - DNA, 22 bp, unidentified
  misc_feature 1..22: note = Description of Unknown:MG29-1-mTRBC2-target site-E1 sequence
  misc_feature 1..22: note = Category: DNA sequence of TRBC2 target site
  source 1..22: mol_type = genomic DNA; note = uncultivated organism sequence
ctcatgagctccgcacttacct

SEQ ID NO: 5252 - DNA, 22 bp, unidentified
  misc_feature 1..22: note = Description of Unknown:MG29-1-mTRBC2-target site-F1 sequence
  misc_feature 1..22: note = Category: DNA sequence of TRBC2 target site
  source 1..22: mol_type = genomic DNA; note = uncultivated organism sequence
ggtgagccctctggccacttgt

SEQ ID NO: 5253 - DNA, 22 bp, unidentified
  misc_feature 1..22: note = Description of Unknown:MG29-1-mTRBC2-target site-G1 sequence
  misc_feature 1..22: note = Category: DNA sequence of TRBC2 target site
  source 1..22: mol_type = genomic DNA; note = uncultivated organism sequence
gaggattgtgccagaaggtagc

SEQ ID NO: 5254 - DNA, 22 bp, unidentified
  misc_feature 1..22: note = Description of Unknown:MG29-1-mTRBC2-target site-H1 sequence
  misc_feature 1..22: note = Category: DNA sequence of TRBC2 target site
  source 1..22: mol_type = genomic DNA; note = uncultivated organism sequence
gtttgtttgcaatctctgcttt

SEQ ID NO: 5255 - DNA, 22 bp, unidentified
  misc_feature 1..22: note = Description of Unknown:MG29-1-mTRBC2-target site-A2 sequence
  misc_feature 1..22: note = Category: DNA sequence of TRBC2 target site
  source 1..22: mol_type = genomic DNA; note = uncultivated organism sequence
tttgtttgcaatctctgctttt

SEQ ID NO: 5256 - DNA, 22 bp, unidentified
  misc_feature 1..22: note = Description of Unknown:MG29-1-mTRBC2-target site-B2 sequence
  misc_feature 1..22: note = Category: DNA sequence of TRBC2 target site
  source 1..22: mol_type = genomic DNA; note = uncultivated organism sequence
tttgcaatctctgcttttgatg

SEQ ID NO: 5257 - DNA, 22 bp, unidentified
  misc_feature 1..22: note = Description of Unknown:MG29-1-mTRBC2-target site-C2 sequence
  misc_feature 1..22: note = Category: DNA sequence of TRBC2 target site
  source 1..22: mol_type = genomic DNA; note = uncultivated organism sequence
caatctctgcttttgatggctc

SEQ ID NO: 5258 - DNA, 22 bp, unidentified
  misc_feature 1..22: note = Description of Unknown:MG29-1-mTRBC2-target site-D2 sequence
  misc_feature 1..22: note = Category: DNA sequence of TRBC2 target site
  source 1..22: mol_type = genomic DNA; note = uncultivated organism sequence
gatggctcaaacaaggagacct

SEQ ID NO: 5259 - DNA, 22 bp, unidentified
  misc_feature 1..22: note = Description of Unknown:MG29-1-mTRBC2-target site-E2 sequence
  misc_feature 1..22: note = Category: DNA sequence of TRBC2 target site
  source 1..22: mol_type = genomic DNA; note = uncultivated organism sequence
atggctcaaacaaggagacctt

SEQ ID NO: 5260 - DNA, 22 bp, unidentified
  misc_feature 1..22: note = Description of Unknown:MG29-1-mTRBC2-target site-F2 sequence
  misc_feature 1..22: note = Category: DNA sequence of TRBC2 target site
  source 1..22: mol_type = genomic DNA; note = uncultivated organism sequence
ctccctctcctttctttcagac

SEQ ID NO: 5261 - DNA, 22 bp, unidentified
  misc_feature 1..22: note = Description of Unknown:MG29-1-mTRBC2-target site-G2 sequence
  misc_feature 1..22: note = Category: DNA sequence of TRBC2 target site
  source 1..22: mol_type = genomic DNA; note = uncultivated organism sequence
tccctctcctttctttcagact

SEQ ID NO: 5262 - DNA, 22 bp, unidentified
  misc_feature 1..22: note = Description of Unknown:MG29-1-mTRBC2-target site-H2 sequence
  misc_feature 1..22: note = Category: DNA sequence of TRBC2 target site
  source 1..22: mol_type = genomic DNA; note = uncultivated organism sequence
tttcagactgtggaatcacttc

SEQ ID NO: 5263 - DNA, 22 bp, unidentified
  misc_feature 1..22: note = Description of Unknown:MG29-1-mTRBC2-target site-A3 sequence
  misc_feature 1..22: note = Category: DNA sequence of TRBC2 target site
  source 1..22: mol_type = genomic DNA; note = uncultivated organism sequence
agactgtggaatcacttcaggt

SEQ ID NO: 5264 - DNA, 22 bp, unidentified
  misc_feature 1..22: note = Description of Unknown:MG29-1-mTRBC2-target site-B3 sequence
  misc_feature 1..22: note = Category: DNA sequence of TRBC2 target site
  source 1..22: mol_type = genomic DNA; note = uncultivated organism sequence
ctgtcaacagcatcctatcatc

SEQ ID NO: 5265 - DNA, 22 bp, unidentified
  misc_feature 1..22: note = Description of Unknown:MG29-1-mTRBC2-target site-C3 sequence
  misc_feature 1..22: note = Category: DNA sequence of TRBC2 target site
  source 1..22: mol_type = genomic DNA; note = uncultivated organism sequence
tccatcctaccattcttaccat

SEQ ID NO: 5266 - DNA, 22 bp, unidentified
  misc_feature 1..22: note = Description of Unknown:MG29-1-mTRBC2-target site-D3 sequence
  misc_feature 1..22: note = Category: DNA sequence of TRBC2 target site
  source 1..22: mol_type = genomic DNA; note = uncultivated organism sequence
tcaggtcaagaaaaaaaattcc

SEQ ID NO: 5267 - DNA, 22 bp, unidentified
  misc_feature 1..22: note = Description of Unknown:MG29-1-mTRBC2-target site-E3 sequence
  misc_feature 1..22: note = Category: DNA sequence of TRBC2 target site
  source 1..22: mol_type = genomic DNA; note = uncultivated organism sequence
tctcaggaattttttttcttga

SEQ ID NO: 5268 - RNA, 42 nt, synthetic construct
  misc_feature 1..42: note = Category: MG29-1 sgRNA targeting FAS
  misc_feature 1..42: note = Description: MG29-1-FAS-sgRNA-A1
  source 1..42: mol_type = other RNA
taatttctactgttgtagataggtaaacaaccgaactgatga

SEQ ID NO: 5269 - RNA, 42 nt, synthetic construct
  misc_feature 1..42: note = Category: MG29-1 sgRNA targeting FAS
  misc_feature 1..42: note = Description: MG29-1-FAS-sgRNA-B1
  source 1..42: mol_type = other RNA
taatttctactgttgtagatcctgagcaaagactcttgctac

SEQ ID NO: 5270 - RNA, 42 nt, synthetic construct
  misc_feature 1..42: note = Category: MG29-1 sgRNA targeting FAS
  misc_feature 1..42: note = Description: MG29-1-FAS-sgRNA-C1
  source 1..42: mol_type = other RNA
taatttctactgttgtagatcagaacgtggcatcaacatcac

SEQ ID NO: 5271 - RNA, 42 nt, synthetic construct
  misc_feature 1..42: note = Category: MG29-1 sgRNA targeting FAS
  misc_feature 1..42: note = Description: MG29-1-FAS-sgRNA-D1
  source 1..42: mol_type = other RNA
taatttctactgttgtagattcaccagctcccatgtgatgtt

SEQ ID NO: 5272 - RNA, 42 nt, synthetic construct
  misc_feature 1..42: note = Category: MG29-1 sgRNA targeting FAS
  misc_feature 1..42: note = Description: MG29-1-FAS-sgRNA-E1
  source 1..42: mol_type = other RNA
taatttctactgttgtagattgtgtctattagatgctcagag

SEQ ID NO: 5273 - RNA, 42 nt, synthetic construct
  misc_feature 1..42: note = Category: MG29-1 sgRNA targeting FAS
  misc_feature 1..42: note = Description: MG29-1-FAS-sgRNA-F1
  source 1..42: mol_type = other RNA
taatttctactgttgtagatgtgtctattagatgctcagagt

SEQ ID NO: 5274 - RNA, 42 nt, synthetic construct
  misc_feature 1..42: note = Category: MG29-1 sgRNA targeting FAS
  misc_feature 1..42: note = Description: MG29-1-FAS-sgRNA-G1
  source 1..42: mol_type = other RNA
taatttctactgttgtagattgtctattagatgctcagagtg

SEQ ID NO: 5275 - RNA, 42 nt, synthetic construct
  misc_feature 1..42: note = Category: MG29-1 sgRNA targeting FAS
  misc_feature 1..42: note = Description: MG29-1-FAS-sgRNA-H1
  source 1..42: mol_type = other RNA
taatttctactgttgtagatgcatctgtcactgcacttacca

SEQ ID NO: 5276 - RNA, 42 nt, synthetic construct
  misc_feature 1..42: note = Category: MG29-1 sgRNA targeting FAS
  misc_feature 1..42: note = Description: MG29-1-FAS-sgRNA-A2
  source 1..42: mol_type = other RNA
taatttctactgttgtagatcatctgtcactgcacttaccac

SEQ ID NO: 5277 - RNA, 42 nt, synthetic construct
  misc_feature 1..42: note = Category: MG29-1 sgRNA targeting FAS
  misc_feature 1..42: note = Description: MG29-1-FAS-sgRNA-B2
  source 1..42: mol_type = other RNA
taatttctactgttgtagatagtagactgttagtgccatgag

SEQ ID NO: 5278 - RNA, 42 nt, synthetic construct
  misc_feature 1..42: note = Category: MG29-1 sgRNA targeting FAS
  misc_feature 1..42: note = Description: MG29-1-FAS-sgRNA-C2
  source 1..42: mol_type = other RNA
taatttctactgttgtagatattttacaggttcttacgtctg

SEQ ID NO: 5279 - RNA, 42 nt, synthetic construct
  misc_feature 1..42: note = Category: MG29-1 sgRNA targeting FAS
  misc_feature 1..42: note = Description: MG29-1-FAS-sgRNA-D2
  source 1..42: mol_type = other RNA
taatttctactgttgtagatttttacaggttcttacgtctgt

SEQ ID NO: 5280 - RNA, 42 nt, synthetic construct
  misc_feature 1..42: note = Category: MG29-1 sgRNA targeting FAS
  misc_feature 1..42: note = Description: MG29-1-FAS-sgRNA-E2
  source 1..42: mol_type = other RNA
taatttctactgttgtagatacaggttcttacgtctgttgct

SEQ ID NO: 5281 - RNA, 42 nt, synthetic construct
  misc_feature 1..42: note = Category: MG29-1 sgRNA targeting FAS
  misc_feature 1..42: note = Description: MG29-1-FAS-sgRNA-F2
  source 1..42: mol_type = other RNA
taatttctactgttgtagatcaggttcttacgtctgttgcta

SEQ ID NO: 5282 - RNA, 42 nt, synthetic construct
  misc_feature 1..42: note = Category: MG29-1 sgRNA targeting FAS
  misc_feature 1..42: note = Description: MG29-1-FAS-sgRNA-G2
  source 1..42: mol_type = other RNA
taatttctactgttgtagatgtgtaacatacctggaggacag

SEQ ID NO: 5283 - RNA, 42 nt, synthetic construct
  misc_feature 1..42: note = Category: MG29-1 sgRNA targeting FAS
  misc_feature 1..42: note = Description: MG29-1-FAS-sgRNA-H2
  source 1..42: mol_type = other RNA
taatttctactgttgtagattgtaacatacctggaggacagg

SEQ ID NO: 5284 - RNA, 42 nt, synthetic construct
  misc_feature 1..42: note = Category: MG29-1 sgRNA targeting FAS
  misc_feature 1..42: note = Description: MG29-1-FAS-sgRNA-A3
  source 1..42: mol_type = other RNA
taatttctactgttgtagatggacgataatctagcaacagac

SEQ ID NO: 5285 - RNA, 42 nt, synthetic construct
  misc_feature 1..42: note = Category: MG29-1 sgRNA targeting FAS
  misc_feature 1..42: note = Description: MG29-1-FAS-sgRNA-B3
  source 1..42: mol_type = other RNA
taatttctactgttgtagatgacgataatctagcaacagacg

SEQ ID NO: 5286 - RNA, 42 nt, synthetic construct
  misc_feature 1..42: note = Category: MG29-1 sgRNA targeting FAS
  misc_feature 1..42: note = Description: MG29-1-FAS-sgRNA-C3
  source 1..42: mol_type = other RNA
taatttctactgttgtagatttccttgggcaggtgaaaggaa

SEQ ID NO: 5287 - RNA, 42 nt, synthetic construct
  misc_feature 1..42: note = Category: MG29-1 sgRNA targeting FAS
  misc_feature 1..42: note = Description: MG29-1-FAS-sgRNA-D3
  source 1..42: mol_type = other RNA
taatttctactgttgtagattccttgggcaggtgaaaggaaa

SEQ ID NO: 5288 - RNA, 42 nt, synthetic construct
  misc_feature 1..42: note = Category: MG29-1 sgRNA targeting FAS
  misc_feature 1..42: note = Description: MG29-1-FAS-sgRNA-E3
  source 1..42: mol_type = other RNA
taatttctactgttgtagatccttgggcaggtgaaaggaaag

SEQ ID NO: 5289 - RNA, 42 nt, synthetic construct
  misc_feature 1..42: note = Category: MG29-1 sgRNA targeting FAS
  misc_feature 1..42: note = Description: MG29-1-FAS-sgRNA-F3
  source 1..42: mol_type = other RNA
taatttctactgttgtagatcttgggcaggtgaaaggaaagc

SEQ ID NO: 5290 - RNA, 42 nt, synthetic construct
  misc_feature 1..42: note = Category: MG29-1 sgRNA targeting FAS
  misc_feature 1..42: note = Description: MG29-1-FAS-sgRNA-G3
  source 1..42: mol_type = other RNA
taatttctactgttgtagattcttccaaatgcagaagatgta

SEQ ID NO: 5291 - RNA, 42 nt, synthetic construct
  misc_feature 1..42: note = Category: MG29-1 sgRNA targeting FAS
  misc_feature 1..42: note = Description: MG29-1-FAS-sgRNA-H3
  source 1..42: mol_type = other RNA
taatttctactgttgtagatcttccaaatgcagaagatgtag

SEQ ID NO: 5292 - RNA, 42 nt, synthetic construct
  misc_feature 1..42: note = Category: MG29-1 sgRNA targeting FAS
  misc_feature 1..42: note = Description: MG29-1-FAS-sgRNA-A4
  source 1..42: mol_type = other RNA
taatttctactgttgtagatttccaaatgcagaagatgtaga

SEQ ID NO: 5293 - RNA, 42 nt, synthetic construct
  misc_feature 1..42: note = Category: MG29-1 sgRNA targeting FAS
  misc_feature 1..42: note = Description: MG29-1-FAS-sgRNA-B4
  source 1..42: mol_type = other RNA
taatttctactgttgtagataagactcttaccatgtccttca

SEQ ID NO: 5294 - RNA, 42 nt, synthetic construct
  misc_feature 1..42: note = Category: MG29-1 sgRNA targeting FAS
  misc_feature 1..42: note = Description: MG29-1-FAS-sgRNA-C4
  source 1..42: mol_type = other RNA
taatttctactgttgtagatagactcttaccatgtccttcat

SEQ ID NO: 5295 - RNA, 42 nt, synthetic construct
  misc_feature 1..42: note = Category: MG29-1 sgRNA targeting FAS
  misc_feature 1..42: note = Description: MG29-1-FAS-sgRNA-D4
  source 1..42: mol_type = other RNA
taatttctactgttgtagatgaagaaaaatgggctttgtctg

SEQ ID NO: 5296 - RNA, 42 nt, synthetic construct
  misc_feature 1..42: note = Category: MG29-1 sgRNA targeting FAS
  misc_feature 1..42: note = Description: MG29-1-FAS-sgRNA-E4
  source 1..42: mol_type = other RNA
taatttctactgttgtagattctgtgtactccttcccttctt

SEQ ID NO: 5297 - RNA, 42 nt, synthetic construct
  misc_feature 1..42: note = Category: MG29-1 sgRNA targeting FAS
  misc_feature 1..42: note = Description: MG29-1-FAS-sgRNA-F4
  source 1..42: mol_type = other RNA
taatttctactgttgtagatcaaactgattttctaggcttag

SEQ ID NO: 5298 - RNA, 42 nt, synthetic construct
  misc_feature 1..42: note = Category: MG29-1 sgRNA targeting FAS
  misc_feature 1..42: note = Description: MG29-1-FAS-sgRNA-G4
  source 1..42: mol_type = other RNA
taatttctactgttgtagatctaggcttagaagtggaaataa

SEQ ID NO: 5299 - RNA, 42 nt, synthetic construct
  misc_feature 1..42: note = Category: MG29-1 sgRNA targeting FAS
  misc_feature 1..42: note = Description: MG29-1-FAS-sgRNA-H4
  source 1..42: mol_type = other RNA
taatttctactgttgtagattaggcttagaagtggaaataaa

SEQ ID NO: 5300 - RNA, 42 nt, synthetic construct
  misc_feature 1..42: note = Category: MG29-1 sgRNA targeting FAS
  misc_feature 1..42: note = Description: MG29-1-FAS-sgRNA-A5
  source 1..42: mol_type = other RNA
taatttctactgttgtagattttgtaactctactgtatgtga

SEQ ID NO: 5301 - RNA, 42 nt, synthetic construct
  misc_feature 1..42: note = Category: MG29-1 sgRNA targeting FAS
  misc_feature 1..42: note = Description: MG29-1-FAS-sgRNA-B5
  source 1..42: mol_type = other RNA
taatttctactgttgtagatttgtaactctactgtatgtgaa

SEQ ID NO: 5302 - RNA, 42 nt, synthetic construct
  misc_feature 1..42: note = Category: MG29-1 sgRNA targeting FAS
  misc_feature 1..42: note = Description: MG29-1-FAS-sgRNA-C5
  source 1..42: mol_type = other RNA
taatttctactgttgtagattgtaactctactgtatgtgaac

SEQ ID NO: 5303 - RNA, 42 nt, synthetic construct
  misc_feature 1..42: note = Category: MG29-1 sgRNA targeting FAS
  misc_feature 1..42: note = Description: MG29-1-FAS-sgRNA-D5
  source 1..42: mol_type = other RNA
taatttctactgttgtagatgtaactctactgtatgtgaaca

SEQ ID NO: 5304 - RNA, 42 nt, synthetic construct
  misc_feature 1..42: note = Category: MG29-1 sgRNA targeting FAS
  misc_feature 1..42: note = Description: MG29-1-FAS-sgRNA-E5
  source 1..42: mol_type = other RNA
taatttctactgttgtagattaactctactgtatgtgaacac

SEQ ID NO: 5305 - RNA, 42 nt, synthetic construct
  misc_feature 1..42: note = Category: MG29-1 sgRNA targeting FAS
  misc_feature 1..42: note = Description: MG29-1-FAS-sgRNA-F5
  source 1..42: mol_type = other RNA
taatttctactgttgtagatgtttacatctgcacttggtatt

SEQ ID NO: 5306 - RNA, 42 nt, synthetic construct
  misc_feature 1..42: note = Category: MG29-1 sgRNA targeting FAS
  misc_feature 1..42: note = Description: MG29-1-FAS-sgRNA-G5
  source 1..42: mol_type = other RNA
taatttctactgttgtagatcatctgcacttggtattctggg

SEQ ID NO: 5307 - RNA, 42 nt, synthetic construct
  misc_feature 1..42: note = Category: MG29-1 sgRNA targeting FAS
  misc_feature 1..42: note = Description: MG29-1-FAS-sgRNA-H5
  source 1..42: mol_type = other RNA
taatttctactgttgtagattcctgtatttttttttctagat

SEQ ID NO: 5308 - RNA, 42 nt, synthetic construct
  misc_feature 1..42: note = Category: MG29-1 sgRNA targeting FAS
  misc_feature 1..42: note = Description: MG29-1-FAS-sgRNA-A6
  source 1..42: mol_type = other RNA
taatttctactgttgtagattttttctagatgtgaacatgga

SEQ ID NO: 5309 - RNA, 42 nt, synthetic construct
  misc_feature 1..42: note = Category: MG29-1 sgRNA targeting FAS
  misc_feature 1..42: note = Description: MG29-1-FAS-sgRNA-B6
  source 1..42: mol_type = other RNA
taatttctactgttgtagatttttctagatgtgaacatggaa

SEQ ID NO: 5310 - RNA, 42 nt, synthetic construct
  misc_feature 1..42: note = Category: MG29-1 sgRNA targeting FAS
  misc_feature 1..42: note = Description: MG29-1-FAS-sgRNA-C6
  source 1..42: mol_type = other RNA
taatttctactgttgtagattttctagatgtgaacatggaat

SEQ ID NO: 5311 - RNA, 42 nt, synthetic construct
  misc_feature 1..42: note = Category: MG29-1 sgRNA targeting FAS
  misc_feature 1..42: note = Description: MG29-1-FAS-sgRNA-D6
  source 1..42: mol_type = other RNA
taatttctactgttgtagatttctagatgtgaacatggaatc

SEQ ID NO: 5312 - RNA, 42 nt, synthetic construct
  misc_feature 1..42: note = Category: MG29-1 sgRNA targeting FAS
  misc_feature 1..42: note = Description: MG29-1-FAS-sgRNA-E6
  source 1..42: mol_type = other RNA
taatttctactgttgtagattctagatgtgaacatggaatca

SEQ ID NO: 5313 - RNA, 42 nt, synthetic construct
  misc_feature 1..42: note = Category: MG29-1 sgRNA targeting FAS
  misc_feature 1..42: note = Description: MG29-1-FAS-sgRNA-F6
  source 1..42: mol_type = other RNA
taatttctactgttgtagatctagatgtgaacatggaatcat

SEQ ID NO: 5314 - RNA, 42 nt, synthetic construct
  misc_feature 1..42: note = Category: MG29-1 sgRNA targeting FAS
  misc_feature 1..42: note = Description: MG29-1-FAS-sgRNA-G6
  source 1..42: mol_type = other RNA
taatttctactgttgtagattagatgtgaacatggaatcatc

SEQ ID NO: 5315 - RNA, 42 nt, synthetic construct
  misc_feature 1..42: note = Category: MG29-1 sgRNA targeting FAS
  misc_feature 1..42: note = Description: MG29-1-FAS-sgRNA-H6
  source 1..42: mol_type = other RNA
taatttctactgttgtagatcacttggtgttgctggtgagtg

SEQ ID NO: 5316 - RNA, 42 nt, synthetic construct
  misc_feature 1..42: note = Category: MG29-1 sgRNA targeting FAS
  misc_feature 1..42: note = Description: MG29-1-FAS-sgRNA-A7
  source 1..42: mol_type = other RNA
taatttctactgttgtagattcttcttcttttgccaattcca

SEQ ID NO: 5317 - RNA, 42 nt, synthetic construct
  misc_feature 1..42: note = Category: MG29-1 sgRNA targeting FAS
  misc_feature 1..42: note = Description: MG29-1-FAS-sgRNA-B7
  source 1..42: mol_type = other RNA
taatttctactgttgtagatgccaattccactaattgtttgg

SEQ ID NO: 5318 - RNA, 42 nt, synthetic construct
  misc_feature 1..42: note = Category: MG29-1 sgRNA targeting FAS
  misc_feature 1..42: note = Description: MG29-1-FAS-sgRNA-C7
  source 1..42: mol_type = other RNA
taatttctactgttgtagatccaattccactaattgtttggg

SEQ ID NO: 5319 - RNA, 42 nt, synthetic construct
  misc_feature 1..42: note = Category: MG29-1 sgRNA targeting FAS
  misc_feature 1..42: note = Description: MG29-1-FAS-sgRNA-D7
  source 1..42: mol_type = other RNA
taatttctactgttgtagataacaaagcaagaacttacccca

SEQ ID NO: 5320 - RNA, 42 nt, synthetic construct
  misc_feature 1..42: note = Category: MG29-1 sgRNA targeting FAS
  misc_feature 1..42: note = Description: MG29-1-FAS-sgRNA-E7
  source 1..42: mol_type = other RNA
taatttctactgttgtagattttgttctttcagtgaagagaa

SEQ ID NO: 5321 - RNA, 42 nt, synthetic construct
  misc_feature 1..42: note = Category: MG29-1 sgRNA targeting FAS
  misc_feature 1..42: note = Description: MG29-1-FAS-sgRNA-F7
  source 1..42: mol_type = other RNA
taatttctactgttgtagatttctttcagtgaagagaaagga

SEQ ID NO: 5322 - RNA, 42 nt, synthetic construct
  misc_feature 1..42: note = Category: MG29-1 sgRNA targeting FAS
  misc_feature 1..42: note = Description: MG29-1-FAS-sgRNA-G7
  source 1..42: mol_type = other RNA
taatttctactgttgtagatagtgaagagaaaggaagtacag

SEQ ID NO: 5323 - RNA, 42 nt, synthetic construct
  misc_feature 1..42: note = Category: MG29-1 sgRNA targeting FAS
  misc_feature 1..42: note = Description: MG29-1-FAS-sgRNA-H7
  source 1..42: mol_type = other RNA
taatttctactgttgtagataatacctacaggatttaaagtt

SEQ ID NO: 5324 - RNA, 42 nt, synthetic construct
  misc_feature 1..42: note = Category: MG29-1 sgRNA targeting FAS
  misc_feature 1..42: note = Description: MG29-1-FAS-sgRNA-A8
  source 1..42: mol_type = other RNA
taatttctactgttgtagataagttggagattcatgagaacc

SEQ ID NO: 5325 - RNA, 42 nt, synthetic construct
  misc_feature 1..42: note = Category: MG29-1 sgRNA targeting FAS
  misc_feature 1..42: note = Description: MG29-1-FAS-sgRNA-B8
  source 1..42: mol_type = other RNA
taatttctactgttgtagatcctttctgtgctttctgcatgt

SEQ ID NO: 5326 - RNA, 42 nt, synthetic construct
  misc_feature 1..42: note = Category: MG29-1 sgRNA targeting FAS
  misc_feature 1..42: note = Description: MG29-1-FAS-sgRNA-C8
  source 1..42: mol_type = other RNA
taatttctactgttgtagatctttctgtgctttctgcatgtt

SEQ ID NO: 5327 - RNA, 42 nt, synthetic construct
  misc_feature 1..42: note = Category: MG29-1 sgRNA targeting FAS
  misc_feature 1..42: note = Description: MG29-1-FAS-sgRNA-D8
  source 1..42: mol_type = other RNA
taatttctactgttgtagattgtgctttctgcatgttttctg

SEQ ID NO: 5328 - RNA, 42 nt, synthetic construct
  misc_feature 1..42: note = Category: MG29-1 sgRNA targeting FAS
  misc_feature 1..42: note = Description: MG29-1-FAS-sgRNA-E8
  source 1..42: mol_type = other RNA
taatttctactgttgtagattgcatgttttctgtacttcctt

SEQ ID NO: 5329 - RNA, 42 nt, synthetic construct
  misc_feature 1..42: note = Category: MG29-1 sgRNA targeting FAS
  misc_feature 1..42: note = Description: MG29-1-FAS-sgRNA-F8
  source 1..42: mol_type = other RNA
taatttctactgttgtagatctgtacttcctttctcttcact

SEQ ID NO: 5330 - RNA, 42 nt, synthetic construct
  misc_feature 1..42: note = Category: MG29-1 sgRNA targeting FAS
  misc_feature 1..42: note = Description: MG29-1-FAS-sgRNA-G8
  source 1..42: mol_type = other RNA
taatttctactgttgtagatttgctttctaggaaacagtggc

SEQ ID NO: 5331 - RNA, 42 nt, synthetic construct
  misc_feature 1..42: note = Category: MG29-1 sgRNA targeting FAS
  misc_feature 1..42: note = Description: MG29-1-FAS-sgRNA-H8
  source 1..42: mol_type = other RNA
taatttctactgttgtagattgctttctaggaaacagtggca

SEQ ID NO: 5332 - RNA, 42 nt, synthetic construct
  misc_feature 1..42: note = Category: MG29-1 sgRNA targeting FAS
  misc_feature 1..42: note = Description: MG29-1-FAS-sgRNA-A9
  source 1..42: mol_type = other RNA
taatttctactgttgtagatgctttctaggaaacagtggcaa

SEQ ID NO: 5333 - RNA, 42 nt, synthetic construct
  misc_feature 1..42: note = Category: MG29-1 sgRNA targeting FAS
  misc_feature 1..42: note = Description: MG29-1-FAS-sgRNA-B9
  source 1..42: mol_type = other RNA
taatttctactgttgtagatctttctaggaaacagtggcaat

SEQ ID NO: 5334 - RNA, 42 nt, synthetic construct
  misc_feature 1..42: note = Category: MG29-1 sgRNA targeting FAS
  misc_feature 1..42: note = Description: MG29-1-FAS-sgRNA-C9
  source 1..42: mol_type = other RNA
taatttctactgttgtagattaggaaacagtggcaataaatt

SEQ ID NO: 5335 - RNA, 42 nt, synthetic construct
  misc_feature 1..42: note = Category: MG29-1 sgRNA targeting FAS
  misc_feature 1..42: note = Description: MG29-1-FAS-sgRNA-D9
  source 1..42: mol_type = other RNA
taatttctactgttgtagatagactattttctatttttcaga

SEQ ID NO: 5336 - RNA, 42 nt, synthetic construct
  misc_feature 1..42: note = Category: MG29-1 sgRNA targeting FAS
  misc_feature 1..42: note = Description: MG29-1-FAS-sgRNA-E9
  source 1..42: mol_type = other RNA
taatttctactgttgtagatctatttttcagatgttgacttg

SEQ ID NO: 5337 - RNA, 42 nt, synthetic construct
  misc_feature 1..42: note = Category: MG29-1 sgRNA targeting FAS
  misc_feature 1..42: note = Description: MG29-1-FAS-sgRNA-F9
  source 1..42: mol_type = other RNA
taatttctactgttgtagattatttttcagatgttgacttga

SEQ ID NO: 5338 - RNA, 42 nt, synthetic construct
  misc_feature 1..42: note = Category: MG29-1 sgRNA targeting FAS
  misc_feature 1..42: note = Description: MG29-1-FAS-sgRNA-G9
  source 1..42: mol_type = other RNA
taatttctactgttgtagattcagatgttgacttgagtaaat

SEQ ID NO: 5339 - RNA, 42 nt, synthetic construct
  misc_feature 1..42: note = Category: MG29-1 sgRNA targeting FAS
  misc_feature 1..42: note = Description: MG29-1-FAS-sgRNA-H9
  source 1..42: mol_type = other RNA
taatttctactgttgtagatcagatgttgacttgagtaaata

SEQ ID NO: 5340 - RNA, 42 nt, synthetic construct
  misc_feature 1..42: note = Category: MG29-1 sgRNA targeting FAS
  misc_feature 1..42: note = Description: MG29-1-FAS-sgRNA-A10
  source 1..42: mol_type = other RNA
taatttctactgttgtagatagatgttgacttgagtaaatat

SEQ ID NO: 5341 - RNA, 42 nt, synthetic construct
  misc_feature 1..42: note = Category: MG29-1 sgRNA targeting FAS
  misc_feature 1..42: note = Description: MG29-1-FAS-sgRNA-B10
  source 1..42: mol_type = other RNA
taatttctactgttgtagatttcgaaagaatggtgtcaatga

SEQ ID NO: 5342 - RNA, 42 nt, synthetic construct
  misc_feature 1..42: note = Category: MG29-1 sgRNA targeting FAS
  misc_feature 1..42: note = Description: MG29-1-FAS-sgRNA-C10
  source 1..42: mol_type = other RNA
taatttctactgttgtagattactcttgcagagaaaattcag

SEQ ID NO: 5343 - RNA, 42 nt, synthetic construct
  misc_feature 1..42: note = Category: MG29-1 sgRNA targeting FAS
  misc_feature 1..42: note = Description: MG29-1-FAS-sgRNA-D10
  source 1..42: mol_type = other RNA
taatttctactgttgtagatttgtttttcactctagaccaag

SEQ ID NO: 5344 - RNA, 42 nt, synthetic construct
  misc_feature 1..42: note = Category: MG29-1 sgRNA targeting FAS
  misc_feature 1..42: note = Description: MG29-1-FAS-sgRNA-E10
  source 1..42: mol_type = other RNA
taatttctactgttgtagattcactctagaccaagctttgga

SEQ ID NO: 5345 - RNA, 42 nt, synthetic construct
  misc_feature 1..42: note = Category: MG29-1 sgRNA targeting FAS
  misc_feature 1..42: note = Description: MG29-1-FAS-sgRNA-F10
  source 1..42: mol_type = other RNA
taatttctactgttgtagatcactctagaccaagctttggat

SEQ ID NO: 5346 - RNA, 42 nt, synthetic construct
  misc_feature 1..42: note = Category: MG29-1 sgRNA targeting FAS
  misc_feature 1..42: note = Description: MG29-1-FAS-sgRNA-G10
  source 1..42: mol_type = other RNA
taatttctactgttgtagatactctagaccaagctttggatt

SEQ ID NO: 5347 - RNA, 42 nt, synthetic construct
  misc_feature 1..42: note = Category: MG29-1 sgRNA targeting FAS
  misc_feature 1..42: note = Description: MG29-1-FAS-sgRNA-H10
  source 1..42: mol_type = other RNA
taatttctactgttgtagatgatttcatttctgaagtttgaa

SEQ ID NO: 5348 - RNA, 42 nt, synthetic construct
  misc_feature 1..42: note = Category: MG29-1 sgRNA targeting FAS
  misc_feature 1..42: note = Description: MG29-1-FAS-sgRNA-A11
  source 1..42: mol_type = other RNA
taatttctactgttgtagatatttctgaagtttgaattttct

SEQ ID NO: 5349 - RNA, 42 nt, synthetic construct
  misc_feature 1..42: note = Category: MG29-1 sgRNA targeting FAS
  misc_feature 1..42: note = Description: MG29-1-FAS-sgRNA-B11
  source 1..42: mol_type = other RNA
taatttctactgttgtagattgaagtttgaattttctgagtc

SEQ ID NO: 5350 - RNA, 42 nt, synthetic construct
  misc_feature 1..42: note = Category: MG29-1 sgRNA targeting FAS
  misc_feature 1..42: note = Description: MG29-1-FAS-sgRNA-C11
  source 1..42: mol_type = other RNA
taatttctactgttgtagataattttctgagtcactagtaat

SEQ ID NO: 5351 - RNA, 42 nt, synthetic construct
  misc_feature 1..42: note = Category: MG29-1 sgRNA targeting FAS
  misc_feature 1..42: note = Description: MG29-1-FAS-sgRNA-D11
  source 1..42: mol_type = other RNA
taatttctactgttgtagatctgagtcactagtaatgtcctt

SEQ ID NO: 5352 - RNA, 42 nt, synthetic construct
  misc_feature 1..42: note = Category: MG29-1 sgRNA targeting FAS
  misc_feature 1..42: note = Description: MG29-1-FAS-sgRNA-E11
  source 1..42: mol_type = other RNA
taatttctactgttgtagattgagtcactagtaatgtccttg

SEQ ID NO: 5353 - RNA, 42 nt, synthetic construct
  misc_feature 1..42: note = Category: MG29-1 sgRNA targeting FAS
  misc_feature 1..42: note = Description: MG29-1-FAS-sgRNA-F11
  source 1..42: mol_type = other RNA
taatttctactgttgtagatctctgcaagagtacaaagattg

SEQ ID NO: 5354 - RNA, 42 nt, synthetic construct
  misc_feature 1..42: note = Category: MG29-1 sgRNA targeting FAS
  misc_feature 1..42: note = Description: MG29-1-FAS-sgRNA-G11
  source 1..42: mol_type = other RNA
taatttctactgttgtagattctgcaagagtacaaagattgg

SEQ ID NO: 5355 - RNA, 42 nt, synthetic construct
  misc_feature 1..42: note = Category: MG29-1 sgRNA targeting FAS
  misc_feature 1..42: note = Description: MG29-1-FAS-sgRNA-H11
  source 1..42: mol_type = other RNA
taatttctactgttgtagatttgagatctttaatcaatgtgt

SEQ ID NO: 5356 - RNA, 42 nt, synthetic construct
  misc_feature 1..42: note = Category: MG29-1 sgRNA targeting FAS
  misc_feature 1..42: note = Description: MG29-1-FAS-sgRNA-A12
  source 1..42: mol_type = other RNA
taatttctactgttgtagattgagatctttaatcaatgtgtc

SEQ ID NO: 5357 - RNA, 42 nt, synthetic construct
  misc_feature 1..42: note = Category: MG29-1 sgRNA targeting FAS
  misc_feature 1..42: note = Description: MG29-1-FAS-sgRNA-B12
  source 1..42: mol_type = other RNA
taatttctactgttgtagatgagatctttaatcaatgtgtca

SEQ ID NO: 5358 - RNA, 42 nt, synthetic construct
  misc_feature 1..42: note = Category: MG29-1 sgRNA targeting FAS
  misc_feature 1..42: note = Description: MG29-1-FAS-sgRNA-C12
  source 1..42: mol_type = other RNA
taatttctactgttgtagatagatctttaatcaatgtgtcat

SEQ ID NO: 5359 - RNA, 42 nt, synthetic construct
  misc_feature 1..42: note = Category: MG29-1 sgRNA targeting FAS
  misc_feature 1..42: note = Description: MG29-1-FAS-sgRNA-D12
  source 1..42: mol_type = other RNA
taatttctactgttgtagatatcaatgtgtcatacgcttctt

SEQ ID NO: 5360 - RNA, 42 nt, synthetic construct
  misc_feature 1..42: note = Category: MG29-1 sgRNA targeting FAS
  misc_feature 1..42: note = Description: MG29-1-FAS-sgRNA-E12
  source 1..42: mol_type = other RNA
taatttctactgttgtagattttccatgaagttgatgccaat

SEQ ID NO: 5361 - RNA, 42 nt, synthetic construct
  misc_feature 1..42: note = Category: MG29-1 sgRNA targeting FAS
  misc_feature 1..42: note = Description: MG29-1-FAS-sgRNA-F12
  source 1..42: mol_type = other RNA
taatttctactgttgtagatcatgaagttgatgccaattacg

SEQ ID NO: 5362 - RNA, 42 nt, synthetic construct
  misc_feature 1..42: note = Category: MG29-1 sgRNA targeting FAS
  misc_feature 1..42: note = Description: MG29-1-FAS-sgRNA-G12
  source 1..42: mol_type = other RNA
taatttctactgttgtagattgttctgctgtgtcttggacat

SEQ ID NO: 5363 - RNA, 42 nt, synthetic construct
  misc_feature 1..42: note = Category: MG29-1 sgRNA targeting FAS
  misc_feature 1..42: note = Description: MG29-1-FAS-sgRNA-H12
  source 1..42: mol_type = other RNA
taatttctactgttgtagatggcttcattgacaccattcttt

SEQ ID NO: 5364 - RNA, 42 nt, synthetic construct
  misc_feature 1..42: note = Category: MG29-1 sgRNA targeting FAS
  misc_feature 1..42: note = Description: MG29-1-FAS-sgRNA-A13
  source 1..42: mol_type = other RNA
taatttctactgttgtagatgcttcattgacaccattctttc

SEQ ID NO: 5365 - RNA, 42 nt, synthetic construct
  misc_feature 1..42: note = Category: MG29-1 sgRNA targeting FAS
  misc_feature 1..42: note = Description: MG29-1-FAS-sgRNA-B13
  source 1..42: mol_type = other RNA
taatttctactgttgtagatgaacaaagcctttaacttgact

SEQ ID NO: 5366 - RNA, 42 nt, synthetic construct
  misc_feature 1..42: note = Category: MG29-1 sgRNA targeting FAS
  misc_feature 1..42: note = Description: MG29-1-FAS-sgRNA-C13
  source 1..42: mol_type = other RNA
taatttctactgttgtagatacttgacttagtgtcatgactc

SEQ ID NO: 5367 - DNA, 22 bp, unidentified
  misc_feature 1..22: note = Description of Unknown:MG29-1-FAS-target site-A1 sequence
  misc_feature 1..22: note = Category: DNA sequence of FAS target site
  source 1..22: mol_type = genomic DNA; note = uncultivated organism sequence
aggtaaacaaccgaactgatga

SEQ ID NO: 5368 - DNA, 22 bp, unidentified
  misc_feature 1..22: note = Description of Unknown:MG29-1-FAS-target site-B1 sequence
  misc_feature 1..22: note = Category: DNA sequence of FAS target site
  source 1..22: mol_type = genomic DNA; note = uncultivated organism sequence
cctgagcaaagactcttgctac

SEQ ID NO: 5369 - DNA, 22 bp, unidentified
  misc_feature 1..22: note = Description of Unknown:MG29-1-FAS-target site-C1 sequence
  misc_feature 1..22: note = Category: DNA sequence of FAS target site
  source 1..22: mol_type = genomic DNA; note = uncultivated organism sequence
cagaacgtggcatcaacatcac

SEQ ID NO: 5370 - DNA, 22 bp, unidentified
  misc_feature 1..22: note = Description of Unknown:MG29-1-FAS-target site-D1 sequence
  misc_feature 1..22: note = Category: DNA sequence of FAS target site
  source 1..22: mol_type = genomic DNA; note = uncultivated organism sequence
tcaccagctcccatgtgatgtt

SEQ ID NO: 5371 - DNA, 22 bp, unidentified
  misc_feature 1..22: note = Description of Unknown:MG29-1-FAS-target site-E1 sequence
  misc_feature 1..22: note = Category: DNA sequence of FAS target site
  source 1..22: mol_type = genomic DNA; note = uncultivated organism sequence
tgtgtctattagatgctcagag

SEQ ID NO: 5372 - DNA, 22 bp, unidentified
  misc_feature 1..22: note = Description of Unknown:MG29-1-FAS-target site-F1 sequence
  misc_feature 1..22: note = Category: DNA sequence of FAS target site
  source 1..22: mol_type = genomic DNA; note = uncultivated organism sequence
gtgtctattagatgctcagagt

SEQ ID NO: 5373 - DNA, 22 bp, unidentified
  misc_feature 1..22: note = Description of Unknown:MG29-1-FAS-target site-G1 sequence
  misc_feature 1..22: note = Category: DNA sequence of FAS target site
  source 1..22: mol_type = genomic DNA; note = uncultivated organism sequence
tgtctattagatgctcagagtg

SEQ ID NO: 5374 - DNA, 22 bp, unidentified
  misc_feature 1..22: note = Description of Unknown:MG29-1-FAS-target site-H1 sequence
  misc_feature 1..22: note = Category: DNA sequence of FAS target site
  source 1..22: mol_type = genomic DNA; note = uncultivated organism sequence
gcatctgtcactgcacttacca

SEQ ID NO: 5375 - DNA, 22 bp, unidentified
  misc_feature 1..22: note = Description of Unknown:MG29-1-FAS-target site-A2 sequence
  misc_feature 1..22: note = Category: DNA sequence of FAS target site
  source 1..22: mol_type = genomic DNA; note = uncultivated organism sequence
catctgtcactgcacttaccac

SEQ ID NO: 5376 - DNA, 22 bp, unidentified
  misc_feature 1..22: note = Description of Unknown:MG29-1-FAS-target site-B2 sequence
  misc_feature 1..22: note = Category: DNA sequence of FAS target site
  source 1..22: mol_type = genomic DNA; note = uncultivated organism sequence
agtagactgttagtgccatgag

SEQ ID NO: 5377 - DNA, 22 bp, unidentified
  misc_feature 1..22: note = Description of Unknown:MG29-1-FAS-target site-C2 sequence
  misc_feature 1..22: note = Category: DNA sequence of FAS target site
  source 1..22: mol_type = genomic DNA; note = uncultivated organism sequence
attttacaggttcttacgtctg

SEQ ID NO: 5378 - DNA, 22 bp, unidentified
  misc_feature 1..22: note = Description of Unknown:MG29-1-FAS-target site-D2 sequence
  misc_feature 1..22: note = Category: DNA sequence of FAS target site
  source 1..22: mol_type = genomic DNA; note = uncultivated organism sequence
ttttacaggttcttacgtctgt

SEQ ID NO: 5379 - DNA, 22 bp, unidentified
  misc_feature 1..22: note = Description of Unknown:MG29-1-FAS-target site-E2 sequence
  misc_feature 1..22: note = Category: DNA sequence of FAS target site
  source 1..22: mol_type = genomic DNA; note = uncultivated organism sequence
acaggttcttacgtctgttgct

SEQ ID NO: 5380 - DNA, 22 bp, unidentified
  misc_feature 1..22: note = Description of Unknown:MG29-1-FAS-target site-F2 sequence
  misc_feature 1..22: note = Category: DNA sequence of FAS target site
  source 1..22: mol_type = genomic DNA; note = uncultivated organism sequence
caggttcttacgtctgttgcta

SEQ ID NO: 5381 - DNA, 22 bp, unidentified
  misc_feature 1..22: note = Description of Unknown:MG29-1-FAS-target site-G2 sequence
  misc_feature 1..22: note = Category: DNA sequence of FAS target site
  source 1..22: mol_type = genomic DNA; note = uncultivated organism sequence
gtgtaacatacctggaggacag

SEQ ID NO: 5382 - DNA, 22 bp, unidentified
  misc_feature 1..22: note = Description of Unknown:MG29-1-FAS-target site-H2 sequence
  misc_feature 1..22: note = Category: DNA sequence of FAS target site
  source 1..22: mol_type = genomic DNA; note = uncultivated organism sequence
tgtaacatacctggaggacagg

SEQ ID NO: 5383 - DNA, 22 bp, unidentified
  misc_feature 1..22: note = Description of Unknown:MG29-1-FAS-target site-A3 sequence
  misc_feature 1..22: note = Category: DNA sequence of FAS target site
  source 1..22: mol_type = genomic DNA; note = uncultivated organism sequence
ggacgataatctagcaacagac

SEQ ID NO: 5384 - DNA, 22 bp, unidentified
  misc_feature 1..22: note = Description of Unknown:MG29-1-FAS-target site-B3 sequence
  misc_feature 1..22: note = Category: DNA sequence of FAS target site
  source 1..22: mol_type = genomic DNA; note = uncultivated organism sequence
gacgataatctagcaacagacg

SEQ ID NO: 5385 - DNA, 22 bp, unidentified
  misc_feature 1..22: note = Description of Unknown:MG29-1-FAS-target site-C3 sequence
  misc_feature 1..22: note = Category: DNA sequence of FAS target site
  source 1..22: mol_type = genomic DNA; note = uncultivated organism sequence
ttccttgggcaggtgaaaggaa

SEQ ID NO: 5386 - DNA, 22 bp, unidentified
  misc_feature 1..22: note = Description of Unknown:MG29-1-FAS-target site-D3 sequence
  misc_feature 1..22: note = Category: DNA sequence of FAS target site
  source 1..22: mol_type = genomic DNA; note = uncultivated organism sequence
tccttgggcaggtgaaaggaaa

SEQ ID NO: 5387 - DNA, 22 bp, unidentified
  misc_feature 1..22: note = Description of Unknown:MG29-1-FAS-target site-E3 sequence
  misc_feature 1..22: note = Category: DNA sequence of FAS target site
  source 1..22: mol_type = genomic DNA; note = uncultivated organism sequence
ccttgggcaggtgaaaggaaag

SEQ ID NO: 5388 - DNA, 22 bp, unidentified
  misc_feature 1..22: note = Description of Unknown:MG29-1-FAS-target site-F3 sequence
  misc_feature 1..22: note = Category: DNA sequence of FAS target site
  source 1..22: mol_type = genomic DNA; note = uncultivated organism sequence
cttgggcaggtgaaaggaaagc

SEQ ID NO: 5389 - DNA, 22 bp, unidentified
  misc_feature 1..22: note = Description of Unknown:MG29-1-FAS-target site-G3 sequence
  misc_feature 1..22: note = Category: DNA sequence of FAS target site
  source 1..22: mol_type = genomic DNA; note = uncultivated organism sequence
tcttccaaatgcagaagatgta

SEQ ID NO: 5390 - DNA, 22 bp, unidentified
  misc_feature 1..22: note = Description of Unknown:MG29-1-FAS-target site-H3 sequence
  misc_feature 1..22: note = Category: DNA sequence of FAS target site
  source 1..22: mol_type = genomic DNA; note = uncultivated organism sequence
cttccaaatgcagaagatgtag

SEQ ID NO: 5391 - DNA, 22 bp, unidentified
  misc_feature 1..22: note = Description of Unknown:MG29-1-FAS-target site-A4 sequence
  misc_feature 1..22: note = Category: DNA sequence of FAS target site
  source 1..22: mol_type = genomic DNA; note = uncultivated organism sequence
ttccaaatgcagaagatgtaga

SEQ ID NO: 5392 - DNA, 22 bp, unidentified
  misc_feature 1..22: note = Description of Unknown:MG29-1-FAS-target site-B4 sequence
  misc_feature 1..22: note = Category: DNA sequence of FAS target site
  source 1..22: mol_type = genomic DNA; note = uncultivated organism sequence
aagactcttaccatgtccttca

SEQ ID NO: 5393 - DNA, 22 bp, unidentified
  misc_feature 1..22: note = Description of Unknown:MG29-1-FAS-target site-C4 sequence
  misc_feature 1..22: note = Category: DNA sequence of FAS target site
  source 1..22: mol_type = genomic DNA; note = uncultivated organism sequence
agactcttaccatgtccttcat

SEQ ID NO: 5394 - DNA, 22 bp, unidentified
  misc_feature 1..22: note = Description of Unknown:MG29-1-FAS-target site-D4 sequence
  misc_feature 1..22: note = Category: DNA sequence of FAS target site
  source 1..22: mol_type = genomic DNA; note = uncultivated organism sequence
gaagaaaaatgggctttgtctg

SEQ ID NO: 5395 - DNA, 22 bp, unidentified
  misc_feature 1..22: note = Description of Unknown:MG29-1-FAS-target site-E4 sequence
  misc_feature 1..22: note = Category: DNA sequence of FAS target site
  source 1..22: mol_type = genomic DNA; note = uncultivated organism sequence
tctgtgtactccttcccttctt

SEQ ID NO: 5396 - DNA, 22 bp, unidentified
  misc_feature 1..22: note = Description of Unknown:MG29-1-FAS-target site-F4 sequence
  misc_feature 1..22: note = Category: DNA sequence of FAS target site
  source 1..22: mol_type = genomic DNA; note = uncultivated organism sequence
caaactgattttctaggcttag

SEQ ID NO: 5397 - DNA, 22 bp, unidentified
  misc_feature 1..22: note = Description of Unknown:MG29-1-FAS-target site-G4 sequence
  misc_feature 1..22: note = Category: DNA sequence of FAS target site
  source 1..22: mol_type = genomic DNA; note = uncultivated organism sequence
ctaggcttagaagtggaaataa

SEQ ID NO: 5398 - DNA, 22 bp, unidentified
  misc_feature 1..22: note = Description of Unknown:MG29-1-FAS-target site-H4 sequence
  misc_feature 1..22: note = Category: DNA sequence of FAS target site
  source 1..22: mol_type = genomic DNA; note = uncultivated organism sequence
taggcttagaagtggaaataaa

SEQ ID NO: 5399 - DNA, 22 bp, unidentified
  misc_feature 1..22: note = Description of Unknown:MG29-1-FAS-target site-A5 sequence
  misc_feature 1..22: note = Category: DNA sequence of FAS target site
  source 1..22: mol_type = genomic DNA; note = uncultivated organism sequence
tttgtaactctactgtatgtga

SEQ ID NO: 5400 - DNA, 22 bp, unidentified
  misc_feature 1..22: note = Description of Unknown:MG29-1-FAS-target site-B5 sequence
  misc_feature 1..22: note = Category: DNA sequence of FAS target site
  source 1..22: mol_type = genomic DNA; note = uncultivated organism sequence
ttgtaactctactgtatgtgaa

SEQ ID NO: 5401 - DNA, 22 bp, unidentified
  misc_feature 1..22: note = Description of Unknown:MG29-1-FAS-target site-C5 sequence
  misc_feature 1..22: note = Category: DNA sequence of FAS target site
  source 1..22: mol_type = genomic DNA; note = uncultivated organism sequence
tgtaactctactgtatgtgaac

SEQ ID NO: 5402 - DNA, 22 bp, unidentified
  misc_feature 1..22: note = Description of Unknown:MG29-1-FAS-target site-D5 sequence
  misc_feature 1..22: note = Category: DNA sequence of FAS target site
  source 1..22: mol_type = genomic DNA; note = uncultivated organism sequence
gtaactctactgtatgtgaaca

SEQ ID NO: 5403 - DNA, 22 bp, unidentified
  misc_feature 1..22: note = Description of Unknown:MG29-1-FAS-target site-E5 sequence
  misc_feature 1..22: note = Category: DNA sequence of FAS target site
  source 1..22: mol_type = genomic DNA; note = uncultivated organism sequence
taactctactgtatgtgaacac

SEQ ID NO: 5404 - DNA, 22 bp, unidentified
  misc_feature 1..22: note = Description of Unknown:MG29-1-FAS-target site-F5 sequence
  misc_feature 1..22: note = Category: DNA sequence of FAS target site
  source 1..22: mol_type = genomic DNA; note = uncultivated organism sequence
gtttacatctgcacttggtatt

SEQ ID NO: 5405 - DNA, 22 bp, unidentified
  misc_feature 1..22: note = Description of Unknown:MG29-1-FAS-target site-G5 sequence
  misc_feature 1..22: note = Category: DNA sequence of FAS target site
  source 1..22: mol_type = genomic DNA; note = uncultivated organism sequence
catctgcacttggtattctggg

SEQ ID NO: 5406 - DNA, 22 bp, unidentified
  misc_feature 1..22: note = Description of Unknown:MG29-1-FAS-target site-H5 sequence
  misc_feature 1..22: note = Category: DNA sequence of FAS target site
  source 1..22: mol_type = genomic DNA; note = uncultivated organism sequence
tcctgtatttttttttctagat

SEQ ID NO: 5407 - DNA, 22 bp, unidentified
  misc_feature 1..22: note = Description of Unknown:MG29-1-FAS-target site-A6 sequence
  misc_feature 1..22: note = Category: DNA sequence of FAS target site
  source 1..22: mol_type = genomic DNA; note = uncultivated organism sequence
tttttctagatgtgaacatgga

SEQ ID NO: 5408 - DNA, 22 bp, unidentified
  misc_feature 1..22: note = Description of Unknown:MG29-1-FAS-target site-B6 sequence
  misc_feature 1..22: note = Category: DNA sequence of FAS target site
  source 1..22: mol_type = genomic DNA; note = uncultivated organism sequence
ttttctagatgtgaacatggaa

SEQ ID NO: 5409 - DNA, 22 bp, unidentified
  misc_feature 1..22: note = Description of Unknown:MG29-1-FAS-target site-C6 sequence
  misc_feature 1..22: note = Category: DNA sequence of FAS target site
  source 1..22: mol_type = genomic DNA; note = uncultivated organism sequence
tttctagatgtgaacatggaat

SEQ ID NO: 5410 - DNA, 22 bp, unidentified
  misc_feature 1..22: note = Description of Unknown:MG29-1-FAS-target site-D6 sequence
  misc_feature 1..22: note = Category: DNA sequence of FAS target site
  source 1..22: mol_type = genomic DNA; note = uncultivated organism sequence
ttctagatgtgaacatggaatc

SEQ ID NO: 5411 - DNA, 22 bp, unidentified
  misc_feature 1..22: note = Description of Unknown:MG29-1-FAS-target site-E6 sequence
  misc_feature 1..22: note = Category: DNA sequence of FAS target site
  source 1..22: mol_type = genomic DNA; note = uncultivated organism sequence
tctagatgtgaacatggaatca

SEQ ID NO: 5412 - DNA, 22 bp, unidentified
  misc_feature 1..22: note = Description of Unknown:MG29-1-FAS-target site-F6 sequence
  misc_feature 1..22: note = Category: DNA sequence of FAS target site
  source 1..22: mol_type = genomic DNA; note = uncultivated organism sequence
ctagatgtgaacatggaatcat

SEQ ID NO: 5413 - DNA, 22 bp, unidentified
  misc_feature 1..22: note = Description of Unknown:MG29-1-FAS-target site-G6 sequence
  misc_feature 1..22: note = Category: DNA sequence of FAS target site
  source 1..22: mol_type = genomic DNA; note = uncultivated organism sequence
tagatgtgaacatggaatcatc

SEQ ID NO: 5414 - DNA, 22 bp, unidentified
  misc_feature 1..22: note = Description of Unknown:MG29-1-FAS-target site-H6 sequence
  misc_feature 1..22: note = Category: DNA sequence of FAS target site
  source 1..22: mol_type = genomic DNA; note = uncultivated organism sequence
cacttggtgttgctggtgagtg

SEQ ID NO: 5415 - DNA, 22 bp, unidentified
  misc_feature 1..22: note = Description of Unknown:MG29-1-FAS-target site-A7 sequence
  misc_feature 1..22: note = Category: DNA sequence of FAS target site
  source 1..22: mol_type = genomic DNA; note = uncultivated organism sequence
tcttcttcttttgccaattcca

SEQ ID NO: 5416 - DNA, 22 bp, unidentified
  misc_feature 1..22: note = Description of Unknown:MG29-1-FAS-target site-B7 sequence
  misc_feature 1..22: note = Category: DNA sequence of FAS target site
  source 1..22: mol_type = genomic DNA; note = uncultivated organism sequence
gccaattccactaattgtttgg

SEQ ID NO: 5417 - DNA, 22 bp, unidentified
  misc_feature 1..22: note = Description of Unknown:MG29-1-FAS-target site-C7 sequence
  misc_feature 1..22: note = Category: DNA sequence of FAS target site
  source 1..22: mol_type = genomic DNA; note = uncultivated organism sequence
ccaattccactaattgtttggg

SEQ ID NO: 5418 - DNA, 22 bp, unidentified
  misc_feature 1..22: note = Description of Unknown:MG29-1-FAS-target site-D7 sequence
  misc_feature 1..22: note = Category: DNA sequence of FAS target site
  source 1..22: mol_type = genomic DNA; note = uncultivated organism sequence
aacaaagcaagaacttacccca

SEQ ID NO: 5419 - DNA, 22 bp, unidentified
  misc_feature 1..22: note = Description of Unknown:MG29-1-FAS-target site-E7 sequence
  misc_feature 1..22: note = Category: DNA sequence of FAS target site
  source 1..22: mol_type = genomic DNA; note = uncultivated organism sequence
tttgttctttcagtgaagagaa

SEQ ID NO: 5420 - DNA, 22 bp, unidentified
  misc_feature 1..22: note = Description of Unknown:MG29-1-FAS-target site-F7 sequence
  misc_feature 1..22: note = Category: DNA sequence of FAS target site
  source 1..22: mol_type = genomic DNA; note = uncultivated organism sequence
ttctttcagtgaagagaaagga

SEQ ID NO: 5421 - DNA, 22 bp, unidentified
  misc_feature 1..22: note = Description of Unknown:MG29-1-FAS-target site-G7 sequence
  misc_feature 1..22: note = Category: DNA sequence of FAS target site
  source 1..22: mol_type = genomic DNA; note = uncultivated organism sequence
agtgaagagaaaggaagtacag

SEQ ID NO: 5422 - DNA, 22 bp, unidentified
  misc_feature 1..22: note = Description of Unknown:MG29-1-FAS-target site-H7 sequence
  misc_feature 1..22: note = Category: DNA sequence of FAS target site
  source 1..22: mol_type = genomic DNA; note = uncultivated organism sequence
aatacctacaggatttaaagtt

SEQ ID NO: 5423 - DNA, 22 bp, unidentified
  misc_feature 1..22: note = Description of Unknown:MG29-1-FAS-target site-A8 sequence
  misc_feature 1..22: note = Category: DNA sequence of FAS target site
  source 1..22: mol_type = genomic DNA; note = uncultivated organism sequence
aagttggagattcatgagaacc

SEQ ID NO: 5424 - DNA, 22 bp, unidentified
  misc_feature 1..22: note = Description of Unknown:MG29-1-FAS-target site-B8 sequence
  misc_feature 1..22: note = Category: DNA sequence of FAS target site
  source 1..22: mol_type = genomic DNA; note = uncultivated organism sequence
cctttctgtgctttctgcatgt

SEQ ID NO: 5425 - DNA, 22 bp, unidentified
  misc_feature 1..22: note = Description of Unknown:MG29-1-FAS-target site-C8 sequence
  misc_feature 1..22: note = Category: DNA sequence of FAS target site
  source 1..22: mol_type = genomic DNA; note = uncultivated organism sequence
ctttctgtgctttctgcatgtt

SEQ ID NO: 5426 - DNA, 22 bp, unidentified
  misc_feature 1..22: note = Description of Unknown:MG29-1-FAS-target site-D8 sequence
  misc_feature 1..22: note = Category: DNA sequence of FAS target site
  source 1..22: mol_type = genomic DNA; note = uncultivated organism sequence
tgtgctttctgcatgttttctg

SEQ ID NO: 5427 - DNA, 22 bp, unidentified
  misc_feature 1..22: note = Description of Unknown:MG29-1-FAS-target site-E8 sequence
  misc_feature 1..22: note = Category: DNA sequence of FAS target site
  source 1..22: mol_type = genomic DNA; note = uncultivated organism sequence
tgcatgttttctgtacttcctt

SEQ ID NO: 5428 - DNA, 22 bp, unidentified
  misc_feature 1..22: note = Description of Unknown:MG29-1-FAS-target site-F8 sequence
  misc_feature 1..22: note = Category: DNA sequence of FAS target site
  source 1..22: mol_type = genomic DNA; note = uncultivated organism sequence
ctgtacttcctttctcttcact

SEQ ID NO: 5429 - DNA, 22 bp, unidentified
  misc_feature 1..22: note = Description of Unknown:MG29-1-FAS-target site-G8 sequence
  misc_feature 1..22: note = Category: DNA sequence of FAS target site
  source 1..22: mol_type = genomic DNA; note = uncultivated organism sequence
ttgctttctaggaaacagtggc

SEQ ID NO: 5430 - DNA, 22 bp, unidentified
  misc_feature 1..22: note = Description of Unknown:MG29-1-FAS-target site-H8 sequence
  misc_feature 1..22: note = Category: DNA sequence of FAS target site
  source 1..22: mol_type = genomic DNA; note = uncultivated organism sequence
tgctttctaggaaacagtggca

SEQ ID NO: 5431 - DNA, 22 bp, unidentified
  misc_feature 1..22: note = Description of Unknown:MG29-1-FAS-target site-A9 sequence
  misc_feature 1..22: note = Category: DNA sequence of FAS target site
  source 1..22: mol_type = genomic DNA; note = uncultivated organism sequence
gctttctaggaaacagtggcaa

SEQ ID NO: 5432 - DNA, 22 bp, unidentified
  misc_feature 1..22: note = Description of Unknown:MG29-1-FAS-target site-B9 sequence
  misc_feature 1..22: note = Category: DNA sequence of FAS target site
  source 1..22: mol_type = genomic DNA; note = uncultivated organism sequence
ctttctaggaaacagtggcaat

SEQ ID NO: 5433 - DNA, 22 bp, unidentified
  misc_feature 1..22: note = Description of Unknown:MG29-1-FAS-target site-C9 sequence
  misc_feature 1..22: note = Category: DNA sequence of FAS target site
  source 1..22: mol_type = genomic DNA; note = uncultivated organism sequence
taggaaacagtggcaataaatt

SEQ ID NO: 5434 - DNA, 22 bp, unidentified
  misc_feature 1..22: note = Description of Unknown:MG29-1-FAS-target site-D9 sequence
  misc_feature 1..22: note = Category: DNA sequence of FAS target site
  source 1..22: mol_type = genomic DNA; note = uncultivated organism sequence
agactattttctatttttcaga

SEQ ID NO: 5435 - DNA, 22 bp, unidentified
  misc_feature 1..22: note = Description of Unknown:MG29-1-FAS-target site-E9 sequence
  misc_feature 1..22: note = Category: DNA sequence of FAS target site
  source 1..22: mol_type = genomic DNA; note = uncultivated organism sequence
ctatttttcagatgttgacttg

SEQ ID NO: 5436 - DNA, 22 bp, unidentified
  misc_feature 1..22: note = Description of Unknown:MG29-1-FAS-target site-F9 sequence
  misc_feature 1..22: note = Category: DNA sequence of FAS target site
  source 1..22: mol_type = genomic DNA; note = uncultivated organism sequence
tatttttcagatgttgacttga

SEQ ID NO: 5437 - DNA, 22 bp, unidentified
  misc_feature 1..22: note = Description of Unknown:MG29-1-FAS-target site-G9 sequence
  misc_feature 1..22: note = Category: DNA sequence of FAS target site
  source 1..22: mol_type = genomic DNA; note = uncultivated organism sequence
tcagatgttgacttgagtaaat

SEQ ID NO: 5438 - DNA, 22 bp, unidentified
  misc_feature 1..22: note = Description of Unknown:MG29-1-FAS-target site-H9 sequence
  misc_feature 1..22: note = Category: DNA sequence of FAS target site
  source 1..22: mol_type = genomic DNA; note = uncultivated organism sequence
cagatgttgacttgagtaaata

SEQ ID NO: 5439 - DNA, 22 bp, unidentified
  misc_feature 1..22: note = Description of Unknown:MG29-1-FAS-target site-A10 sequence
  misc_feature 1..22: note = Category: DNA sequence of FAS target site
  source 1..22: mol_type = genomic DNA; note = uncultivated organism sequence
agatgttgacttgagtaaatat

SEQ ID NO: 5440 - DNA, 22 bp, unidentified
  misc_feature 1..22: note = Description of Unknown:MG29-1-FAS-target site-B10 sequence
  misc_feature 1..22: note = Category: DNA sequence of FAS target site
  source 1..22: mol_type = genomic DNA; note = uncultivated organism sequence
ttcgaaagaatggtgtcaatga

SEQ ID NO: 5441 - DNA, 22 bp, unidentified
  misc_feature 1..22: note = Description of Unknown:MG29-1-FAS-target site-C10 sequence
  misc_feature 1..22: note = Category: DNA sequence of FAS target site
  source 1..22: mol_type = genomic DNA; note = uncultivated organism sequence
tactcttgcagagaaaattcag

SEQ ID NO: 5442 - DNA, 22 bp, unidentified
  misc_feature 1..22: note = Description of Unknown:MG29-1-FAS-target site-D10 sequence
  misc_feature 1..22: note = Category: DNA sequence of FAS target site
  source 1..22: mol_type = genomic DNA; note = uncultivated organism sequence
ttgtttttcactctagaccaag

SEQ ID NO: 5443 - DNA, 22 bp, unidentified
  misc_feature 1..22: note = Description of Unknown:MG29-1-FAS-target site-E10 sequence
  misc_feature 1..22: note = Category: DNA sequence of FAS target site
  source 1..22: mol_type = genomic DNA; note = uncultivated organism sequence
tcactctagaccaagctttgga

SEQ ID NO: 5444 - DNA, 22 bp, unidentified
  misc_feature 1..22: note = Description of Unknown:MG29-1-FAS-target site-F10 sequence
  misc_feature 1..22: note = Category: DNA sequence of FAS target site
  source 1..22: mol_type = genomic DNA; note = uncultivated organism sequence
cactctagaccaagctttggat

SEQ ID NO: 5445 - DNA, 22 bp, unidentified
  misc_feature 1..22: note = Description of Unknown:MG29-1-FAS-target site-G10 sequence
  misc_feature 1..22: note = Category: DNA sequence of FAS target site
  source 1..22: mol_type = genomic DNA; note = uncultivated organism sequence
actctagaccaagctttggatt

SEQ ID NO: 5446 - DNA, 22 bp, unidentified
  misc_feature 1..22: note = Description of Unknown:MG29-1-FAS-target site-H10 sequence
  misc_feature 1..22: note = Category: DNA sequence of FAS target site
  source 1..22: mol_type = genomic DNA; note = uncultivated organism sequence
gatttcatttctgaagtttgaa

SEQ ID NO: 5447 - DNA, 22 bp, unidentified
  misc_feature 1..22: note = Description of Unknown:MG29-1-FAS-target site-A11 sequence
  misc_feature 1..22: note = Category: DNA sequence of FAS target site
  source 1..22: mol_type = genomic DNA; note = uncultivated organism sequence
atttctgaagtttgaattttct

SEQ ID NO: 5448 - DNA, 22 bp, unidentified
  misc_feature 1..22: note = Description of Unknown:MG29-1-FAS-target site-B11 sequence
  misc_feature 1..22: note = Category: DNA sequence of FAS target site
  source 1..22: mol_type = genomic DNA; note = uncultivated organism sequence
tgaagtttgaattttctgagtc

SEQ ID NO: 5449 - DNA, 22 bp, unidentified
  misc_feature 1..22: note = Description of Unknown:MG29-1-FAS-target site-C11 sequence
  misc_feature 1..22: note = Category: DNA sequence of FAS target site
  source 1..22: mol_type = genomic DNA; note = uncultivated organism sequence
aattttctgagtcactagtaat

SEQ ID NO: 5450 - DNA, 22 bp, unidentified
  misc_feature 1..22: note = Description of Unknown:MG29-1-FAS-target site-D11 sequence
  misc_feature 1..22: note = Category: DNA sequence of FAS target site
  source 1..22: mol_type = genomic DNA; note = uncultivated organism sequence
ctgagtcactagtaatgtcctt

SEQ ID NO: 5451 - DNA, 22 bp, unidentified
  misc_feature 1..22: note = Description of Unknown:MG29-1-FAS-target site-E11 sequence
  misc_feature 1..22: note = Category: DNA sequence of FAS target site
  source 1..22: mol_type = genomic DNA; note = uncultivated organism sequence
tgagtcactagtaatgtccttg

SEQ ID NO: 5452 - DNA, 22 bp, unidentified
  misc_feature 1..22: note = Description of Unknown:MG29-1-FAS-target site-F11 sequence
  misc_feature 1..22: note = Category: DNA sequence of FAS target site
  source 1..22: mol_type = genomic DNA; note = uncultivated organism sequence
ctctgcaagagtacaaagattg

SEQ ID NO: 5453 - DNA, 22 bp, unidentified
  misc_feature 1..22: note = Description of Unknown:MG29-1-FAS-target site-G11 sequence
  misc_feature 1..22: note = Category: DNA sequence of FAS target site
  source 1..22: mol_type = genomic DNA; note = uncultivated organism sequence
tctgcaagagtacaaagattgg

SEQ ID NO: 5454 - DNA, 22 bp, unidentified
  misc_feature 1..22: note = Description of Unknown:MG29-1-FAS-target site-H11 sequence
  misc_feature 1..22: note = Category: DNA sequence of FAS target site
  source 1..22: mol_type = genomic DNA; note = uncultivated organism sequence
ttgagatctttaatcaatgtgt

SEQ ID NO: 5455 - DNA, 22 bp, unidentified
  misc_feature 1..22: note = Description of Unknown:MG29-1-FAS-target site-A12 sequence
  misc_feature 1..22: note = Category: DNA sequence of FAS target site
  source 1..22: mol_type = genomic DNA; note = uncultivated organism sequence
tgagatctttaatcaatgtgtc

SEQ ID NO: 5456 - DNA, 22 bp, unidentified
  misc_feature 1..22: note = Description of Unknown:MG29-1-FAS-target site-B12 sequence
  misc_feature 1..22: note = Category: DNA sequence of FAS target site
  source 1..22: mol_type = genomic DNA; note = uncultivated organism sequence
gagatctttaatcaatgtgtca

SEQ ID NO: 5457 - DNA, 22 bp, unidentified
  misc_feature 1..22: note = Description of Unknown:MG29-1-FAS-target site-C12 sequence
  misc_feature 1..22: note = Category: DNA sequence of FAS target site
  source 1..22: mol_type = genomic DNA; note = uncultivated organism sequence
agatctttaatcaatgtgtcat

SEQ ID NO: 5458 - DNA, 22 bp, unidentified
  misc_feature 1..22: note = Description of Unknown:MG29-1-FAS-target site-D12 sequence
  misc_feature 1..22: note = Category: DNA sequence of FAS target site
  source 1..22: mol_type = genomic DNA; note = uncultivated organism sequence
atcaatgtgtcatacgcttctt

SEQ ID NO: 5459 - DNA, 22 bp, unidentified
  misc_feature 1..22: note = Description of Unknown:MG29-1-FAS-target site-E12 sequence
  misc_feature 1..22: note = Category: DNA sequence of FAS target site
  source 1..22: mol_type = genomic DNA; note = uncultivated organism sequence
tttccatgaagttgatgccaat

SEQ ID NO: 5460 - DNA, 22 bp, unidentified
  misc_feature 1..22: note = Description of Unknown:MG29-1-FAS-target site-F12 sequence
  misc_feature 1..22: note = Category: DNA sequence of FAS target site
  source 1..22: mol_type = genomic DNA; note = uncultivated organism sequence
catgaagttgatgccaattacg

SEQ ID NO: 5461 - DNA, 22 bp, unidentified
  misc_feature 1..22: note = Description of Unknown:MG29-1-FAS-target site-G12 sequence
  misc_feature 1..22: note = Category: DNA sequence of FAS target site
  source 1..22: mol_type = genomic DNA; note = uncultivated organism sequence
tgttctgctgtgtcttggacat

SEQ ID NO: 5462 - DNA, 22 bp, unidentified
  misc_feature 1..22: note = Description of Unknown:MG29-1-FAS-target site-H12 sequence
  misc_feature 1..22: note = Category: DNA sequence of FAS target site
  source 1..22: mol_type = genomic DNA; note = uncultivated organism sequence
ggcttcattgacaccattcttt

SEQ ID NO: 5463 - DNA, 22 bp, unidentified
  misc_feature 1..22: note = Description of Unknown:MG29-1-FAS-target site-A13 sequence
  misc_feature 1..22: note = Category: DNA sequence of FAS target site
  source 1..22: mol_type = genomic DNA; note = uncultivated organism sequence
gcttcattgacaccattctttc

SEQ ID NO: 5464 - DNA, 22 bp, unidentified
  misc_feature 1..22: note = Description of Unknown:MG29-1-FAS-target site-B13 sequence
  misc_feature 1..22: note = Category: DNA sequence of FAS target site
  source 1..22: mol_type = genomic DNA; note = uncultivated organism sequence
gaacaaagcctttaacttgact

SEQ ID NO: 5465 - DNA, 22 bp, unidentified
  misc_feature 1..22: note = Description of Unknown:MG29-1-FAS-target site-C13 sequence
  misc_feature 1..22: note = Category: DNA sequence of FAS target site
  source 1..22: mol_type = genomic DNA; note = uncultivated organism sequence
acttgacttagtgtcatgactc

SEQ ID NO: 5466 - RNA, 42 nt, synthetic construct
  misc_feature 1..42: note = Category: MG29-1 sgRNA targeting PD-1
  misc_feature 1..42: note = Description: MG29-1-PD-1-sgRNA-A1
  source 1..42: mol_type = other RNA
taatttctactgttgtagatctagcggaatgggcacctcatc

SEQ ID NO: 5467 - RNA, 42 nt, synthetic construct
  misc_feature 1..42: note = Category: MG29-1 sgRNA targeting PD-1
  misc_feature 1..42: note = Description: MG29-1-PD-1-sgRNA-B1
  source 1..42: mol_type = other RNA
taatttctactgttgtagatcagtggcgagagaagaccccgg

SEQ ID NO: 5468 - RNA, 42 nt, synthetic construct
  misc_feature 1..42: note = Category: MG29-1 sgRNA targeting PD-1
  misc_feature 1..42: note = Description: MG29-1-PD-1-sgRNA-C1
  source 1..42: mol_type = other RNA
taatttctactgttgtagattcctcaaagaaggaggacccct

SEQ ID NO: 5469 - RNA, 42 nt, synthetic construct
  misc_feature 1..42: note = Category: MG29-1 sgRNA targeting PD-1
  misc_feature 1..42: note = Description: MG29-1-PD-1-sgRNA-D1
  source 1..42: mol_type = other RNA
taatttctactgttgtagattctgcagggacaataggagcca

SEQ ID NO: 5470 - RNA, 42 nt, synthetic construct
  misc_feature 1..42: note = Category: MG29-1 sgRNA targeting PD-1
  misc_feature 1..42: note = Description: MG29-1-PD-1-sgRNA-E1
  source 1..42: mol_type = other RNA
taatttctactgttgtagatgaactggccggctggcctgggt

SEQ ID NO: 5471 - RNA, 42 nt, synthetic construct
  misc_feature 1..42: note = Category: MG29-1 sgRNA targeting PD-1
  misc_feature 1..42: note = Description: MG29-1-PD-1-sgRNA-F1
  source 1..42: mol_type = other RNA
taatttctactgttgtagattgcccttccagagagaagggca

SEQ ID NO: 5472 - RNA, 42 nt, synthetic construct
  misc_feature 1..42: note = Category: MG29-1 sgRNA targeting PD-1
  misc_feature 1..42: note = Description: MG29-1-PD-1-sgRNA-G1
  source 1..42: mol_type = other RNA
taatttctactgttgtagatatctgcgccttgggggccaggg

SEQ ID NO: 5473 - RNA, 42 nt, synthetic construct
  misc_feature 1..42: note = Category: MG29-1 sgRNA targeting PD-1
  misc_feature 1..42: note = Description: MG29-1-PD-1-sgRNA-H1
  source 1..42: mol_type = other RNA
taatttctactgttgtagatgcacgaagctctccgatgtgtt

SEQ ID NO: 5474 - DNA, 22 bp, unidentified
  misc_feature 1..22: note = Description of Unknown:MG29-1-PD-1-target site-A1 sequence
  misc_feature 1..22: note = Category: DNA sequence of PD-1 target site
  source 1..22: mol_type = genomic DNA; note = uncultivated organism sequence
atctgcgccttgggggccaggg

SEQ ID NO: 5475 - DNA, 22 bp, unidentified
  misc_feature 1..22: note = Description of Unknown:MG29-1-PD-1-target site-B1 sequence
  misc_feature 1..22: note = Category: DNA sequence of PD-1 target site
  source 1..22: mol_type = genomic DNA; note = uncultivated organism sequence
gcacgaagctctccgatgtgtt

SEQ ID NO: 5476 - DNA, 22 bp, unidentified
  misc_feature 1..22: note = Description of Unknown:MG29-1-PD-1-target site-C1 sequence
  misc_feature 1..22: note = Category: DNA sequence of PD-1 target site
  source 1..22: mol_type = genomic DNA; note = uncultivated organism sequence
gaactggccggctggcctgggt

SEQ ID NO: 5477 - DNA, 22 bp, unidentified
  misc_feature 1..22: note = Description of Unknown:MG29-1-PD-1-target site-D1 sequence
  misc_feature 1..22: note = Category: DNA sequence of PD-1 target site
  source 1..22: mol_type = genomic DNA; note = uncultivated organism sequence
tgcccttccagagagaagggca

SEQ ID NO: 5478 - DNA, 22 bp, unidentified
  misc_feature 1..22: note = Description of Unknown:MG29-1-PD-1-target site-E1 sequence
  misc_feature 1..22: note = Category: DNA sequence of PD-1 target site
  source 1..22: mol_type = genomic DNA; note = uncultivated organism sequence
tctgcagggacaataggagcca

SEQ ID NO: 5479 - DNA, 22 bp, unidentified
  misc_feature 1..22: note = Description of Unknown:MG29-1-PD-1-target site-F1 sequence
  misc_feature 1..22: note = Category: DNA sequence of PD-1 target site
  source 1..22: mol_type = genomic DNA; note = uncultivated organism sequence
tcctcaaagaaggaggacccct

SEQ ID NO: 5480 - DNA, 22 bp, unidentified
  misc_feature 1..22: note = Description of Unknown:MG29-1-PD-1-target site-G1 sequence
  misc_feature 1..22: note = Category: DNA sequence of PD-1 target site
  source 1..22: mol_type = genomic DNA; note = uncultivated organism sequence
cagtggcgagagaagaccccgg

SEQ ID NO: 5481 - DNA, 22 bp, unidentified
  misc_feature 1..22: note = Description of Unknown:MG29-1-PD-1-target site-H1 sequence
  misc_feature 1..22: note = Category: DNA sequence of PD-1 target site
  source 1..22: mol_type = genomic DNA; note = uncultivated organism sequence
ctagcggaatgggcacctcatc

SEQ ID NO: 5482 - RNA, 42 nt, synthetic construct
  misc_feature 1..42: note = Category: MG29-1 sgRNA targeting HPRT
  misc_feature 1..42: note = Description: MG29-1-HPRT-sgRNA-A1
  source 1..42: mol_type = other RNA
taatttctactgttgtagattctccctggcttacctttagga

SEQ ID NO: 5483 - RNA, 42 nt, synthetic construct
  misc_feature 1..42: note = Category: MG29-1 sgRNA targeting HPRT
  misc_feature 1..42: note = Description: MG29-1-HPRT-sgRNA-B1
  source 1..42: mol_type = other RNA
taatttctactgttgtagatgaacacaagcccaccattaaaa

SEQ ID NO: 5484 - RNA, 42 nt, synthetic construct
  misc_feature 1..42: note = Category: MG29-1 sgRNA targeting HPRT
  misc_feature 1..42: note = Description: MG29-1-HPRT-sgRNA-C1
  source 1..42: mol_type = other RNA
taatttctactgttgtagataatggtgggcttgtgttctaaa

SEQ ID NO: 5485 - RNA, 42 nt, synthetic construct
  misc_feature 1..42: note = Category: MG29-1 sgRNA targeting HPRT
  misc_feature 1..42: note = Description: MG29-1-HPRT-sgRNA-D1
  source 1..42: mol_type = other RNA
taatttctactgttgtagatatggtgggcttgtgttctaaag

SEQ ID NO: 5486 - RNA, 42 nt, synthetic construct
  misc_feature 1..42: note = Category: MG29-1 sgRNA targeting HPRT
  misc_feature 1..42: note = Description: MG29-1-HPRT-sgRNA-E1
  source 1..42: mol_type = other RNA
taatttctactgttgtagatccctaacaaagatgggtttgtt

SEQ ID NO: 5487 - RNA, 42 nt, synthetic construct
  misc_feature 1..42: note = Category: MG29-1 sgRNA targeting HPRT
  misc_feature 1..42: note = Description: MG29-1-HPRT-sgRNA-F1
  source 1..42: mol_type = other RNA
taatttctactgttgtagataaggcacccaaattaataacgc

SEQ ID NO: 5488 - RNA, 42 nt, synthetic construct
  misc_feature 1..42: note = Category: MG29-1 sgRNA targeting HPRT
  misc_feature 1..42: note = Description: MG29-1-HPRT-sgRNA-G1
  source 1..42: mol_type = other RNA
taatttctactgttgtagattagcgttattaatttgggtgcc

SEQ ID NO: 5489 - RNA, 42 nt, synthetic construct
  misc_feature 1..42: note = Category: MG29-1 sgRNA targeting HPRT
  misc_feature 1..42: note = Description: MG29-1-HPRT-sgRNA-H1
  source 1..42: mol_type = other RNA
taatttctactgttgtagattcgagtgtagtctgttagccac

SEQ ID NO: 5490 - RNA, 42 nt, synthetic construct
  misc_feature 1..42: note = Category: MG29-1 sgRNA targeting HPRT
  misc_feature 1..42: note = Description: MG29-1-HPRT-sgRNA-A2
  source 1..42: mol_type = other RNA
taatttctactgttgtagatttagggagttatgatgttgtcc

SEQ ID NO: 5491 - RNA, 42 nt, synthetic construct
  misc_feature 1..42: note = Category: MG29-1 sgRNA targeting HPRT
  misc_feature 1..42: note = Description: MG29-1-HPRT-sgRNA-B2
  source 1..42: mol_type = other RNA
taatttctactgttgtagattaggtgcaggatcaatgacagc

SEQ ID NO: 5492 - RNA, 42 nt, synthetic construct
  misc_feature 1..42: note = Category: MG29-1 sgRNA targeting HPRT
  misc_feature 1..42: note = Description: MG29-1-HPRT-sgRNA-C2
  source 1..42: mol_type = other RNA
taatttctactgttgtagatgtaggtgcaggatcaatgacag

SEQ ID NO: 5493 - RNA, 42 nt, synthetic construct
  misc_feature 1..42: note = Category: MG29-1 sgRNA targeting HPRT
  misc_feature 1..42: note = Description: MG29-1-HPRT-sgRNA-D2
  source 1..42: mol_type = other RNA
taatttctactgttgtagatctgtcattgatcctgcacctac

SEQ ID NO: 5494 - RNA, 42 nt, synthetic construct
  misc_feature 1..42: note = Category: MG29-1 sgRNA targeting HPRT
  misc_feature 1..42: note = Description: MG29-1-HPRT-sgRNA-E2
  source 1..42: mol_type = other RNA
taatttctactgttgtagatcagcacagtaattctcaccaaa

SEQ ID NO: 5495 - RNA, 42 nt, synthetic construct
  misc_feature 1..42: note = Category: MG29-1 sgRNA targeting HPRT
  misc_feature 1..42: note = Description: MG29-1-HPRT-sgRNA-F2
  source 1..42: mol_type = other RNA
taatttctactgttgtagatggtgagaattactgtgctgaaa

SEQ ID NO: 5496 - RNA, 42 nt, synthetic construct
  misc_feature 1..42: note = Category: MG29-1 sgRNA targeting HPRT
  misc_feature 1..42: note = Description: MG29-1-HPRT-sgRNA-G2
  source 1..42: mol_type = other RNA
taatttctactgttgtagattcctgaatagcatggcagagga

SEQ ID NO: 5497 - RNA, 42 nt, synthetic construct
  misc_feature 1..42: note = Category: MG29-1 sgRNA targeting HPRT
  misc_feature 1..42: note = Description: MG29-1-HPRT-sgRNA-H2
  source 1..42: mol_type = other RNA
taatttctactgttgtagatcaagggggcccaaaatcctctg

SEQ ID NO: 5498 - RNA, 42 nt, synthetic construct
  misc_feature 1..42: note = Category: MG29-1 sgRNA targeting HPRT
  misc_feature 1..42: note = Description: MG29-1-HPRT-sgRNA-A3
  source 1..42: mol_type = other RNA
taatttctactgttgtagatgcaagggggcccaaaatcctct

SEQ ID NO: 5499 - RNA, 42 nt, synthetic construct
  misc_feature 1..42: note = Category: MG29-1 sgRNA targeting HPRT
  misc_feature 1..42: note = Description: MG29-1-HPRT-sgRNA-B3
  source 1..42: mol_type = other RNA
taatttctactgttgtagatgggcccccttgcaaaattaaga

SEQ ID NO: 5500 - RNA, 42 nt, synthetic construct
  misc_feature 1..42: note = Category: MG29-1 sgRNA targeting HPRT
  misc_feature 1..42: note = Description: MG29-1-HPRT-sgRNA-C3
  source 1..42: mol_type = other RNA
taatttctactgttgtagatggcccccttgcaaaattaagaa

SEQ ID NO: 5501 - RNA, 42 nt, synthetic construct
  misc_feature 1..42: note = Category: MG29-1 sgRNA targeting HPRT
  misc_feature 1..42: note = Description: MG29-1-HPRT-sgRNA-D3
  source 1..42: mol_type = other RNA
taatttctactgttgtagatactacagacacaaagaagatgc

SEQ ID NO: 5502 - RNA, 42 nt, synthetic construct
  misc_feature 1..42: note = Category: MG29-1 sgRNA targeting HPRT
  misc_feature 1..42: note = Description: MG29-1-HPRT-sgRNA-E3
  source 1..42: mol_type = other RNA
taatttctactgttgtagatttattaagtcggcctcacctcc

SEQ ID NO: 5503 - RNA, 42 nt, synthetic construct
  misc_feature 1..42: note = Category: MG29-1 sgRNA targeting HPRT
  misc_feature 1..42: note = Description: MG29-1-HPRT-sgRNA-F3
  source 1..42: mol_type = other RNA
taatttctactgttgtagattattaagtcggcctcacctcct

SEQ ID NO: 5504 - RNA, 42 nt, synthetic construct
  misc_feature 1..42: note = Category: MG29-1 sgRNA targeting HPRT
  misc_feature 1..42: note = Description: MG29-1-HPRT-sgRNA-G3
  source 1..42: mol_type = other RNA
taatttctactgttgtagatattaagtcggcctcacctcctc

SEQ ID NO: 5505 - RNA, 42 nt, synthetic construct
  misc_feature 1..42: note = Category: MG29-1 sgRNA targeting HPRT
  misc_feature 1..42: note = Description: MG29-1-HPRT-sgRNA-H3
  source 1..42: mol_type = other RNA
taatttctactgttgtagatttaagtcggcctcacctcctca

SEQ ID NO: 5506 - RNA, 42 nt, synthetic construct
  misc_feature 1..42: note = Category: MG29-1 sgRNA targeting HPRT
  misc_feature 1..42: note = Description: MG29-1-HPRT-sgRNA-A4
  source 1..42: mol_type = other RNA
taatttctactgttgtagattatgtaggggtcaggtaatgtt

SEQ ID NO: 5507 - RNA, 42 nt, synthetic construct
  misc_feature 1..42: note = Category: MG29-1 sgRNA targeting HPRT
  misc_feature 1..42: note = Description: MG29-1-HPRT-sgRNA-B4
  source 1..42: mol_type = other RNA
taatttctactgttgtagatatgtaggggtcaggtaatgttc

SEQ ID NO: 5508 - RNA, 42 nt, synthetic construct
  misc_feature 1..42: note = Category: MG29-1 sgRNA targeting HPRT
  misc_feature 1..42: note = Description: MG29-1-HPRT-sgRNA-C4
  source 1..42: mol_type = other RNA
taatttctactgttgtagattgtaggggtcaggtaatgttct

SEQ ID NO: 5509 - RNA, 42 nt, synthetic construct
  misc_feature 1..42: note = Category: MG29-1 sgRNA targeting HPRT
  misc_feature 1..42: note = Description: MG29-1-HPRT-sgRNA-D4
  source 1..42: mol_type = other RNA
taatttctactgttgtagatgaaaaaatcacggtatctgtcg

SEQ ID NO: 5510 - RNA, 42 nt, synthetic construct
  misc_feature 1..42: note = Category: MG29-1 sgRNA targeting HPRT
  misc_feature 1..42: note = Description: MG29-1-HPRT-sgRNA-E4
  source 1..42: mol_type = other RNA
taatttctactgttgtagataatcagagtaagccttctagtg

SEQ ID NO: 5511 - RNA, 42 nt, synthetic construct
  misc_feature 1..42: note = Category: MG29-1 sgRNA targeting HPRT
  misc_feature 1..42: note = Description: MG29-1-HPRT-sgRNA-F4
  source 1..42: mol_type = other RNA
taatttctactgttgtagatggacaggtactatgagagtata

SEQ ID NO: 5512 - RNA, 42 nt, synthetic construct
  misc_feature 1..42: note = Category: MG29-1 sgRNA targeting HPRT
  misc_feature 1..42: note = Description: MG29-1-HPRT-sgRNA-G4
  source 1..42: mol_type = other RNA
taatttctactgttgtagataaatgtcaacctactgtggcat

SEQ ID NO: 5513 - RNA, 42 nt, synthetic construct
  misc_feature 1..42: note = Category: MG29-1 sgRNA targeting HPRT
  misc_feature 1..42: note = Description: MG29-1-HPRT-sgRNA-H4
  source 1..42: mol_type = other RNA
taatttctactgttgtagataatgtcaacctactgtggcata

SEQ ID NO: 5514 - RNA, 42 nt, synthetic construct
  misc_feature 1..42: note = Category: MG29-1 sgRNA targeting HPRT
  misc_feature 1..42: note = Description: MG29-1-HPRT-sgRNA-A5
  source 1..42: mol_type = other RNA
taatttctactgttgtagatgttgttctttcctggtatatgc

SEQ ID NO: 5515 - RNA, 42 nt, synthetic construct
  misc_feature 1..42: note = Category: MG29-1 sgRNA targeting HPRT
  misc_feature 1..42: note = Description: MG29-1-HPRT-sgRNA-B5
  source 1..42: mol_type = other RNA
taatttctactgttgtagatctggtatatgctgtggaattga

SEQ ID NO: 5516 - RNA, 42 nt, synthetic construct
  misc_feature 1..42: note = Category: MG29-1 sgRNA targeting HPRT
  misc_feature 1..42: note = Description: MG29-1-HPRT-sgRNA-C5
  source 1..42: mol_type = other RNA
taatttctactgttgtagatagcatgtcctacctgtggcaac

SEQ ID NO: 5517 - RNA, 42 nt, synthetic construct
  misc_feature 1..42: note = Category: MG29-1 sgRNA targeting HPRT
  misc_feature 1..42: note = Description: MG29-1-HPRT-sgRNA-D5
  source 1..42: mol_type = other RNA
taatttctactgttgtagatgtgttgccacaggtaggacatg

SEQ ID NO: 5518 - RNA, 42 nt, synthetic construct
  misc_feature 1..42: note = Category: MG29-1 sgRNA targeting HPRT
  misc_feature 1..42: note = Description: MG29-1-HPRT-sgRNA-E5
  source 1..42: mol_type = other RNA
taatttctactgttgtagattgttgccacaggtaggacatgc

SEQ ID NO: 5519 - RNA, 42 nt, synthetic construct
  misc_feature 1..42: note = Category: MG29-1 sgRNA targeting HPRT
  misc_feature 1..42: note = Description: MG29-1-HPRT-sgRNA-F5
  source 1..42: mol_type = other RNA
taatttctactgttgtagatcatactgtaaatgggtaaccgt

SEQ ID NO: 5520 - RNA, 42 nt, synthetic construct
  misc_feature 1..42: note = Category: MG29-1 sgRNA targeting HPRT
  misc_feature 1..42: note = Description: MG29-1-HPRT-sgRNA-G5
  source 1..42: mol_type = other RNA
taatttctactgttgtagatccatactgtaaatgggtaaccg

SEQ ID NO: 5521 - RNA, 42 nt, synthetic construct
  misc_feature 1..42: note = Category: MG29-1 sgRNA targeting HPRT
  misc_feature 1..42: note = Description: MG29-1-HPRT-sgRNA-H5
  source 1..42: mol_type = other RNA
taatttctactgttgtagatataaagctccatctctaaggca

SEQ ID NO: 5522 - RNA, 42 nt, synthetic construct
  misc_feature 1..42: note = Category: MG29-1 sgRNA targeting HPRT
  misc_feature 1..42: note = Description: MG29-1-HPRT-sgRNA-A6
  source 1..42: mol_type = other RNA
taatttctactgttgtagatgtgataccttttctggagcatt

SEQ ID NO: 5523 - RNA, 42 nt, synthetic construct
  misc_feature 1..42: note = Category: MG29-1 sgRNA targeting HPRT
  misc_feature 1..42: note = Description: MG29-1-HPRT-sgRNA-B6
  source 1..42: mol_type = other RNA
taatttctactgttgtagatctggagcattcctgagttcagg

SEQ ID NO: 5524 - RNA, 42 nt, synthetic construct
  misc_feature 1..42: note = Category: MG29-1 sgRNA targeting HPRT
  misc_feature 1..42: note = Description: MG29-1-HPRT-sgRNA-C6
  source 1..42: mol_type = other RNA
taatttctactgttgtagattggagcattcctgagttcaggt

SEQ ID NO: 5525 - RNA, 42 nt, synthetic construct
  misc_feature 1..42: note = Category: MG29-1 sgRNA targeting HPRT
  misc_feature 1..42: note = Description: MG29-1-HPRT-sgRNA-D6
  source 1..42: mol_type = other RNA
taatttctactgttgtagattgctgtgattggcttgttatgt

SEQ ID NO: 5526 - RNA, 42 nt, synthetic construct
  misc_feature 1..42: note = Category: MG29-1 sgRNA targeting HPRT
  misc_feature 1..42: note = Description: MG29-1-HPRT-sgRNA-E6
  source 1..42: mol_type = other RNA
taatttctactgttgtagatgctgtgattggcttgttatgtt

SEQ ID NO: 5527 - RNA, 42 nt, synthetic construct
  misc_feature 1..42: note = Category: MG29-1 sgRNA targeting HPRT
  misc_feature 1..42: note = Description: MG29-1-HPRT-sgRNA-F6
  source 1..42: mol_type = other RNA
taatttctactgttgtagatctgtgattggcttgttatgttc

SEQ ID NO: 5528 - RNA, 42 nt, synthetic construct
  misc_feature 1..42: note = Category: MG29-1 sgRNA targeting HPRT
  misc_feature 1..42: note = Description: MG29-1-HPRT-sgRNA-G6
  source 1..42: mol_type = other RNA
taatttctactgttgtagatttggaagagtcatgagggacat

SEQ ID NO: 5529 - RNA, 42 nt, synthetic construct
  misc_feature 1..42: note = Category: MG29-1 sgRNA targeting HPRT
  misc_feature 1..42: note = Description: MG29-1-HPRT-sgRNA-H6
  source 1..42: mol_type = other RNA
taatttctactgttgtagatcagatgttaaaggcagtctcaa

SEQ ID NO: 5530 - RNA, 42 nt, synthetic construct
  misc_feature 1..42: note = Category: MG29-1 sgRNA targeting HPRT
  misc_feature 1..42: note = Description: MG29-1-HPRT-sgRNA-A7
  source 1..42: mol_type = other RNA
taatttctactgttgtagatcttgagactgcctttaacatct

SEQ ID NO: 5531 - RNA, 42 nt, synthetic construct
  misc_feature 1..42: note = Category: MG29-1 sgRNA targeting HPRT
  misc_feature 1..42: note = Description: MG29-1-HPRT-sgRNA-B7
  source 1..42: mol_type = other RNA
taatttctactgttgtagatttgagactgcctttaacatctg

SEQ ID NO: 5532 - RNA, 42 nt, synthetic construct
  misc_feature 1..42: note = Category: MG29-1 sgRNA targeting HPRT
  misc_feature 1..42: note = Description: MG29-1-HPRT-sgRNA-C7
  source 1..42: mol_type = other RNA
taatttctactgttgtagattaacccaaatgctgcctgttga

SEQ ID NO: 5533 - RNA, 42 nt, synthetic construct
  misc_feature 1..42: note = Category: MG29-1 sgRNA targeting HPRT
  misc_feature 1..42: note = Description: MG29-1-HPRT-sgRNA-D7
  source 1..42: mol_type = other RNA
taatttctactgttgtagatataacccaaatgctgcctgttg

SEQ ID NO: 5534 - RNA, 42 nt, synthetic construct
  misc_feature 1..42: note = Category: MG29-1 sgRNA targeting HPRT
  misc_feature 1..42: note = Description: MG29-1-HPRT-sgRNA-E7
  source 1..42: mol_type = other RNA
taatttctactgttgtagattcaacaggcagcatttgggtta

SEQ ID NO: 5535 - RNA, 42 nt, synthetic construct
  misc_feature 1..42: note = Category: MG29-1 sgRNA targeting HPRT
  misc_feature 1..42: note = Description: MG29-1-HPRT-sgRNA-F7
  source 1..42: mol_type = other RNA
taatttctactgttgtagatcaacaggcagcatttgggttat

SEQ ID NO: 5536 - RNA, 42 nt, synthetic construct
  misc_feature 1..42: note = Category: MG29-1 sgRNA targeting HPRT
  misc_feature 1..42: note = Description: MG29-1-HPRT-sgRNA-G7
  source 1..42: mol_type = other RNA
taatttctactgttgtagataacaggcagcatttgggttata

SEQ ID NO: 5537 - RNA, 42 nt, synthetic construct
  misc_feature 1..42: note = Category: MG29-1 sgRNA targeting HPRT
  misc_feature 1..42: note = Description: MG29-1-HPRT-sgRNA-H7
  source 1..42: mol_type = other RNA
taatttctactgttgtagatgaacaaaagctggaggtggtat

SEQ ID NO: 5538 - RNA, 42 nt, synthetic construct
  misc_feature 1..42: note = Category: MG29-1 sgRNA targeting HPRT
  misc_feature 1..42: note = Description: MG29-1-HPRT-sgRNA-A8
  source 1..42: mol_type = other RNA
taatttctactgttgtagatggtagagttgacttataccacc

SEQ ID NO: 5539 - RNA, 42 nt, synthetic construct
  misc_feature 1..42: note = Category: MG29-1 sgRNA targeting HPRT
  misc_feature 1..42: note = Description: MG29-1-HPRT-sgRNA-B8
  source 1..42: mol_type = other RNA
taatttctactgttgtagatgtagagttgacttataccacct

SEQ ID NO: 5540 - RNA, 42 nt, synthetic construct
  misc_feature 1..42: note = Category: MG29-1 sgRNA targeting HPRT
  misc_feature 1..42: note = Description: MG29-1-HPRT-sgRNA-C8
  source 1..42: mol_type = other RNA
taatttctactgttgtagatggaacaaaagctggaggtggta

SEQ ID NO: 5541 - RNA, 42 nt, synthetic construct
  misc_feature 1..42: note = Category: MG29-1 sgRNA targeting HPRT
  misc_feature 1..42: note = Description: MG29-1-HPRT-sgRNA-D8
  source 1..42: mol_type = other RNA
taatttctactgttgtagattggaacaaaagctggaggtggt

SEQ ID NO: 5542 - RNA, 42 nt, synthetic construct
  misc_feature 1..42: note = Category: MG29-1 sgRNA targeting HPRT
  misc_feature 1..42: note = Description: MG29-1-HPRT-sgRNA-E8
  source 1..42: mol_type = other RNA
taatttctactgttgtagattttttggaacaaaagctggagg

SEQ ID NO: 5543 - RNA, 42 nt, synthetic construct
  misc_feature 1..42: note = Category: MG29-1 sgRNA targeting HPRT
  misc_feature 1..42: note = Description: MG29-1-HPRT-sgRNA-F8
  source 1..42: mol_type = other RNA
taatttctactgttgtagatgggtaaaacaactagtgtgcca

SEQ ID NO: 5544 - RNA, 42 nt, synthetic construct
  misc_feature 1..42: note = Category: MG29-1 sgRNA targeting HPRT
  misc_feature 1..42: note = Description: MG29-1-HPRT-sgRNA-G8
  source 1..42: mol_type = other RNA
taatttctactgttgtagatggcacactagttgttttaccct

SEQ ID NO: 5545 - RNA, 42 nt, synthetic construct
  misc_feature 1..42: note = Category: MG29-1 sgRNA targeting HPRT
  misc_feature 1..42: note = Description: MG29-1-HPRT-sgRNA-H8
  source 1..42: mol_type = other RNA
taatttctactgttgtagatgcacactagttgttttacccta

SEQ ID NO: 5546 - RNA, 42 nt, synthetic construct
  misc_feature 1..42: note = Category: MG29-1 sgRNA targeting HPRT
  misc_feature 1..42: note = Description: MG29-1-HPRT-sgRNA-A9
  source 1..42: mol_type = other RNA
taatttctactgttgtagatccctaaagttcctctttgtaag

SEQ ID NO: 5547 - RNA, 42 nt, synthetic construct
  misc_feature 1..42: note = Category: MG29-1 sgRNA targeting HPRT
  misc_feature 1..42: note = Description: MG29-1-HPRT-sgRNA-B9
  source 1..42: mol_type = other RNA
taatttctactgttgtagatgggattgtatttccaaggtttc

SEQ ID NO: 5548 - RNA, 42 nt, synthetic construct
  misc_feature 1..42: note = Category: MG29-1 sgRNA targeting HPRT
  misc_feature 1..42: note = Description: MG29-1-HPRT-sgRNA-C9
  source 1..42: mol_type = other RNA
taatttctactgttgtagatcaaggtttctagactgagagcc

SEQ ID NO: 5549 - RNA, 42 nt, synthetic construct
  misc_feature 1..42: note = Category: MG29-1 sgRNA targeting HPRT
  misc_feature 1..42: note = Description: MG29-1-HPRT-sgRNA-D9
  source 1..42: mol_type = other RNA
taatttctactgttgtagattagactgagagcccttttcatc

SEQ ID NO: 5550 - RNA, 42 nt, synthetic construct
  misc_feature 1..42: note = Category: MG29-1 sgRNA targeting HPRT
  misc_feature 1..42: note = Description: MG29-1-HPRT-sgRNA-E9
  source 1..42: mol_type = other RNA
taatttctactgttgtagatcatctttgctcattgacactct

SEQ ID NO: 5551 - RNA, 42 nt, synthetic construct
  misc_feature 1..42: note = Category: MG29-1 sgRNA targeting HPRT
  misc_feature 1..42: note = Description: MG29-1-HPRT-sgRNA-F9
  source 1..42: mol_type = other RNA
taatttctactgttgtagatatctttgctcattgacactctg

SEQ ID NO: 5552 - RNA, 42 nt, synthetic construct
  misc_feature 1..42: note = Category: MG29-1 sgRNA targeting HPRT
  misc_feature 1..42: note = Description: MG29-1-HPRT-sgRNA-G9
  source 1..42: mol_type = other RNA
taatttctactgttgtagatctcattgacactctgtacccat

SEQ ID NO: 5553 - RNA, 42 nt, synthetic construct
  misc_feature 1..42: note = Category: MG29-1 sgRNA targeting HPRT
  misc_feature 1..42: note = Description: MG29-1-HPRT-sgRNA-H9
  source 1..42: mol_type = other RNA
taatttctactgttgtagatacacacccaaggaaagactatg

SEQ ID NO: 5554 - RNA, 42 nt, synthetic construct
  misc_feature 1..42: note = Category: MG29-1 sgRNA targeting HPRT
  misc_feature 1..42: note = Description: MG29-1-HPRT-sgRNA-A10
  source 1..42: mol_type = other RNA
taatttctactgttgtagataacacacccaaggaaagactat

SEQ ID NO: 5555 - RNA, 42 nt, synthetic construct
  misc_feature 1..42: note = Category: MG29-1 sgRNA targeting HPRT
  misc_feature 1..42: note = Description: MG29-1-HPRT-sgRNA-B10
  source 1..42: mol_type = other RNA
taatttctactgttgtagatgctctccatttcatagtctttc

SEQ ID NO: 5556 - RNA, 42 nt, synthetic construct
  misc_feature 1..42: note = Category: MG29-1 sgRNA targeting HPRT
  misc_feature 1..42: note = Description: MG29-1-HPRT-sgRNA-C10
  source 1..42: mol_type = other RNA
taatttctactgttgtagatatagtctttccttgggtgtgtt

SEQ ID NO: 5557 - RNA, 42 nt, synthetic construct
  misc_feature 1..42: note = Category: MG29-1 sgRNA targeting HPRT
  misc_feature 1..42: note = Description: MG29-1-HPRT-sgRNA-D10
  source 1..42: mol_type = other RNA
taatttctactgttgtagatcttgggtgtgttaaaagtgacc

SEQ ID NO: 5558 - RNA, 42 nt, synthetic construct
  misc_feature 1..42: note = Category: MG29-1 sgRNA targeting HPRT
  misc_feature 1..42: note = Description: MG29-1-HPRT-sgRNA-E10
  source 1..42: mol_type = other RNA
taatttctactgttgtagatatccgtgctgagtgtaccatgg

SEQ ID NO: 5559 - RNA, 42 nt, synthetic construct
  misc_feature 1..42: note = Category: MG29-1 sgRNA targeting HPRT
  misc_feature 1..42: note = Description: MG29-1-HPRT-sgRNA-F10
  source 1..42: mol_type = other RNA
taatttctactgttgtagatatttcatccgtgctgagtgtac

SEQ ID NO: 5560 - RNA, 42 nt, synthetic construct
  misc_feature 1..42: note = Category: MG29-1 sgRNA targeting HPRT
  misc_feature 1..42: note = Description: MG29-1-HPRT-sgRNA-G10
  source 1..42: mol_type = other RNA
taatttctactgttgtagatgaaacgtcagtcttctcttttg

SEQ ID NO: 5561 - RNA, 42 nt, synthetic construct
  misc_feature 1..42: note = Category: MG29-1 sgRNA targeting HPRT
  misc_feature 1..42: note = Description: MG29-1-HPRT-sgRNA-H10
  source 1..42: mol_type = other RNA
taatttctactgttgtagattagagaggcacatttgccagta

SEQ ID NO: 5562 - DNA, 22 bp, unidentified
  misc_feature 1..22: note = Description of Unknown:MG29-1-HPRT-target site-A1 sequence
  misc_feature 1..22: note = Category: DNA sequence of HPRT target site
  source 1..22: mol_type = genomic DNA; note = uncultivated organism sequence
tctccctggcttacctttagga

SEQ ID NO: 5563 - DNA, 22 bp, unidentified
  misc_feature 1..22: note = Description of Unknown:MG29-1-HPRT-target site-B1 sequence
  misc_feature 1..22: note = Category: DNA sequence of HPRT target site
  source 1..22: mol_type = genomic DNA; note = uncultivated organism sequence
gaacacaagcccaccattaaaa

SEQ ID NO: 5564 - DNA, 22 bp, unidentified
  misc_feature 1..22: note = Description of Unknown:MG29-1-HPRT-target site-C1 sequence
  misc_feature 1..22: note = Category: DNA sequence of HPRT target site
  source 1..22: mol_type = genomic DNA; note = uncultivated organism sequence
aatggtgggcttgtgttctaaa

SEQ ID NO: 5565 - DNA, 22 bp, unidentified
  misc_feature 1..22: note = Description of Unknown:MG29-1-HPRT-target site-D1 sequence
  misc_feature 1..22: note = Category: DNA sequence of HPRT target site
  source 1..22: mol_type = genomic DNA; note = uncultivated organism sequence
atggtgggcttgtgttctaaag

SEQ ID NO: 5566 - DNA, 22 bp, unidentified
  misc_feature 1..22: note = Description of Unknown:MG29-1-HPRT-target site-E1 sequence
  misc_feature 1..22: note = Category: DNA sequence of HPRT target site
  source 1..22: mol_type = genomic DNA; note = uncultivated organism sequence
ccctaacaaagatgggtttgtt

SEQ ID NO: 5567 - DNA, 22 bp, unidentified
  misc_feature 1..22: note = Description of Unknown:MG29-1-HPRT-target site-F1 sequence
  misc_feature 1..22: note = Category: DNA sequence of HPRT target site
  source 1..22: mol_type = genomic DNA; note = uncultivated organism sequence
aaggcacccaaattaataacgc

SEQ ID NO: 5568 - DNA, 22 bp, unidentified
  misc_feature 1..22: note = Description of Unknown:MG29-1-HPRT-target site-G1 sequence
  misc_feature 1..22: note = Category: DNA sequence of HPRT target site
  source 1..22: mol_type = genomic DNA; note = uncultivated organism sequence
tagcgttattaatttgggtgcc

SEQ ID NO: 5569 - DNA, 22 bp, unidentified
  misc_feature 1..22: note = Description of Unknown:MG29-1-HPRT-target site-H1 sequence
  misc_feature 1..22: note = Category: DNA sequence of HPRT target site
  source 1..22: mol_type = genomic DNA; note = uncultivated organism sequence
tcgagtgtagtctgttagccac

SEQ ID NO: 5570 - DNA, 22 bp, unidentified
  misc_feature 1..22: note = Description of Unknown:MG29-1-HPRT-target site-A2 sequence
  misc_feature 1..22: note = Category: DNA sequence of HPRT target site
  source 1..22: mol_type = genomic DNA; note = uncultivated organism sequence
ttagggagttatgatgttgtcc

SEQ ID NO: 5571 - DNA, 22 bp, unidentified
  misc_feature 1..22: note = Description of Unknown:MG29-1-HPRT-target site-B2 sequence
  misc_feature 1..22: note = Category: DNA sequence of HPRT target site
  source 1..22: mol_type = genomic DNA; note = uncultivated organism sequence
taggtgcaggatcaatgacagc

SEQ ID NO: 5572 - DNA, 22 bp, unidentified
  misc_feature 1..22: note = Description of Unknown:MG29-1-HPRT-target site-C2 sequence
  misc_feature 1..22: note = Category: DNA sequence of HPRT target site
  source 1..22: mol_type = genomic DNA; note = uncultivated organism sequence
gtaggtgcaggatcaatgacag

SEQ ID NO: 5573 - DNA, 22 bp, unidentified
  misc_feature 1..22: note = Description of Unknown:MG29-1-HPRT-target site-D2 sequence
  misc_feature 1..22: note = Category: DNA sequence of HPRT target site
  source 1..22: mol_type = genomic DNA; note = uncultivated organism sequence
ctgtcattgatcctgcacctac

SEQ ID NO: 5574 - DNA, 22 bp, unidentified
  misc_feature 1..22: note = Description of Unknown:MG29-1-HPRT-target site-E2 sequence
  misc_feature 1..22: note = Category: DNA sequence of HPRT target site
  source 1..22: mol_type = genomic DNA; note = uncultivated organism sequence
cagcacagtaattctcaccaaa

SEQ ID NO: 5575 - DNA, 22 bp, unidentified
  misc_feature 1..22: note = Description of Unknown:MG29-1-HPRT-target site-F2 sequence
  misc_feature 1..22: note = Category: DNA sequence of HPRT target site
  source 1..22: mol_type = genomic DNA; note = uncultivated organism sequence
ggtgagaattactgtgctgaaa

SEQ ID NO: 5576 - DNA, 22 bp, unidentified
  misc_feature 1..22: note = Description of Unknown:MG29-1-HPRT-target site-G2 sequence
  misc_feature 1..22: note = Category: DNA sequence of HPRT target site
  source 1..22: mol_type = genomic DNA; note = uncultivated organism sequence
tcctgaatagcatggcagagga

SEQ ID NO: 5577 - DNA, 22 bp, unidentified
  misc_feature 1..22: note = Description of Unknown:MG29-1-HPRT-target site-H2 sequence
  misc_feature 1..22: note = Category: DNA sequence of HPRT target site
  source 1..22: mol_type = genomic DNA; note = uncultivated organism sequence
caagggggcccaaaatcctctg

SEQ ID NO: 5578 - DNA, 22 bp, unidentified
  misc_feature 1..22: note = Description of Unknown:MG29-1-HPRT-target site-A3 sequence
  misc_feature 1..22: note = Category: DNA sequence of HPRT target site
  source 1..22: mol_type = genomic DNA; note = uncultivated organism sequence
gcaagggggcccaaaatcctct

SEQ ID NO: 5579 - DNA, 22 bp, unidentified
  misc_feature 1..22: note = Description of Unknown:MG29-1-HPRT-target site-B3 sequence
  misc_feature 1..22: note = Category: DNA sequence of HPRT target site
  source 1..22: mol_type = genomic DNA; note = uncultivated organism sequence
gggcccccttgcaaaattaaga

SEQ ID NO: 5580 - DNA, 22 bp, unidentified
  misc_feature 1..22: note = Description of Unknown:MG29-1-HPRT-target site-C3 sequence
  misc_feature 1..22: note = Category: DNA sequence of HPRT target site
  source 1..22: mol_type = genomic DNA; note = uncultivated organism sequence
ggcccccttgcaaaattaagaa

SEQ ID NO: 5581 - DNA, 22 bp, unidentified
  misc_feature 1..22: note = Description of Unknown:MG29-1-HPRT-target site-D3 sequence
  misc_feature 1..22: note = Category: DNA sequence of HPRT target site
  source 1..22: mol_type = genomic DNA; note = uncultivated organism sequence
actacagacacaaagaagatgc

SEQ ID NO: 5582 - DNA, 22 bp, unidentified
  misc_feature 1..22: note = Description of Unknown:MG29-1-HPRT-target site-E3 sequence
  misc_feature 1..22: note = Category: DNA sequence of HPRT target site
  source 1..22: mol_type = genomic DNA; note = uncultivated organism sequence
ttattaagtcggcctcacctcc

SEQ ID NO: 5583 - DNA, 22 bp, unidentified
  misc_feature 1..22: note = Description of Unknown:MG29-1-HPRT-target site-F3 sequence
  misc_feature 1..22: note = Category: DNA sequence of HPRT target site
  source 1..22: mol_type = genomic DNA; note = uncultivated organism sequence
tattaagtcggcctcacctcct

SEQ ID NO: 5584 - DNA, 22 bp, unidentified
  misc_feature 1..22: note = Description of Unknown:MG29-1-HPRT-target site-G3 sequence
  misc_feature 1..22: note = Category: DNA sequence of HPRT target site
  source 1..22: mol_type = genomic DNA; note = uncultivated organism sequence
attaagtcggcctcacctcctc

SEQ ID NO: 5585 - DNA, 22 bp, unidentified
  misc_feature 1..22: note = Description of Unknown:MG29-1-HPRT-target site-H3 sequence
  misc_feature 1..22: note = Category: DNA sequence of HPRT target site
  source 1..22: mol_type = genomic DNA; note = uncultivated organism sequence
ttaagtcggcctcacctcctca

SEQ ID NO: 5586 - DNA, 22 bp, unidentified
  misc_feature 1..22: note = Description of Unknown:MG29-1-HPRT-target site-A4 sequence
  misc_feature 1..22: note = Category: DNA sequence of HPRT target site
  source 1..22: mol_type = genomic DNA; note = uncultivated organism sequence
tatgtaggggtcaggtaatgtt

SEQ ID NO: 5587 - DNA, 22 bp, unidentified
  misc_feature 1..22: note = Description of Unknown:MG29-1-HPRT-target site-B4 sequence
  misc_feature 1..22: note = Category: DNA sequence of HPRT target site
  source 1..22: mol_type = genomic DNA; note = uncultivated organism sequence
atgtaggggtcaggtaatgttc

SEQ ID NO: 5588 - DNA, 22 bp, unidentified
  misc_feature 1..22: note = Description of Unknown:MG29-1-HPRT-target site-C4 sequence
  misc_feature 1..22: note = Category: DNA sequence of HPRT target site
  source 1..22: mol_type = genomic DNA; note = uncultivated organism sequence
tgtaggggtcaggtaatgttct

SEQ ID NO: 5589 - DNA, 22 bp, unidentified
  misc_feature 1..22: note = Description of Unknown:MG29-1-HPRT-target site-D4 sequence
  misc_feature 1..22: note = Category: DNA sequence of HPRT target site
  source 1..22: mol_type = genomic DNA; note = uncultivated organism sequence
gaaaaaatcacggtatctgtcg

SEQ ID NO: 5590 - DNA, 22 bp, unidentified
  misc_feature 1..22: note = Description of Unknown:MG29-1-HPRT-target site-E4 sequence
  misc_feature 1..22: note = Category: DNA sequence of HPRT target site
  source 1..22: mol_type = genomic DNA; note = uncultivated organism sequence
aatcagagtaagccttctagtg

SEQ ID NO: 5591 - DNA, 22 bp, unidentified
  misc_feature 1..22: note = Description of Unknown:MG29-1-HPRT-target site-F4 sequence
  misc_feature 1..22: note = Category: DNA sequence of HPRT target site
  source 1..22: mol_type = genomic DNA; note = uncultivated organism sequence
ggacaggtactatgagagtata

SEQ ID NO: 5592 - DNA, 22 bp, unidentified
  misc_feature 1..22: note = Description of Unknown:MG29-1-HPRT-target site-G4 sequence
  misc_feature 1..22: note = Category: DNA sequence of HPRT target site
  source 1..22: mol_type = genomic DNA; note = uncultivated organism sequence
aaatgtcaacctactgtggcat

SEQ ID NO: 5593 - DNA, 22 bp, unidentified
  misc_feature 1..22: note = Description of Unknown:MG29-1-HPRT-target site-H4 sequence
  misc_feature 1..22: note = Category: DNA sequence of HPRT target site
  source 1..22: mol_type = genomic DNA; note = uncultivated organism sequence
aatgtcaacctactgtggcata

SEQ ID NO: 5594 - DNA, 22 bp, unidentified
  misc_feature 1..22: note = Description of Unknown:MG29-1-HPRT-target site-A5 sequence
  misc_feature 1..22: note = Category: DNA sequence of HPRT target site
  source 1..22: mol_type = genomic DNA; note = uncultivated organism sequence
gttgttctttcctggtatatgc

SEQ ID NO: 5595 - DNA, 22 bp, unidentified
  misc_feature 1..22: note = Description of Unknown:MG29-1-HPRT-target site-B5 sequence
  misc_feature 1..22: note = Category: DNA sequence of HPRT target site
  source 1..22: mol_type = genomic DNA; note = uncultivated organism sequence
ctggtatatgctgtggaattga

SEQ ID NO: 5596 - DNA, 22 bp, unidentified
  misc_feature 1..22: note = Description of Unknown:MG29-1-HPRT-target site-C5 sequence
  misc_feature 1..22: note = Category: DNA sequence of HPRT target site
  source 1..22: mol_type = genomic DNA; note = uncultivated organism sequence
agcatgtcctacctgtggcaac

SEQ ID NO: 5597 - DNA, 22 bp, unidentified
  misc_feature 1..22: note = Description of Unknown:MG29-1-HPRT-target site-D5 sequence
  misc_feature 1..22: note = Category: DNA sequence of HPRT target site
  source 1..22: mol_type = genomic DNA; note = uncultivated organism sequence
gtgttgccacaggtaggacatg

SEQ ID NO: 5598 - DNA, 22 bp, unidentified
  misc_feature 1..22: note = Description of Unknown:MG29-1-HPRT-target site-E5 sequence
  misc_feature 1..22: note = Category: DNA sequence of HPRT target site
  source 1..22: mol_type = genomic DNA; note = uncultivated organism sequence
tgttgccacaggtaggacatgc

SEQ ID NO: 5599 - DNA, 22 bp, unidentified
  misc_feature 1..22: note = Description of Unknown:MG29-1-HPRT-target site-F5 sequence
  misc_feature 1..22: note = Category: DNA sequence of HPRT target site
  source 1..22: mol_type = genomic DNA; note = uncultivated organism sequence
catactgtaaatgggtaaccgt

SEQ ID NO: 5600 - DNA, 22 bp, unidentified
  misc_feature 1..22: note = Description of Unknown:MG29-1-HPRT-target site-G5 sequence
  misc_feature 1..22: note = Category: DNA sequence of HPRT target site
  source 1..22: mol_type = genomic DNA; note = uncultivated organism sequence
ccatactgtaaatgggtaaccg

SEQ ID NO: 5601 - DNA, 22 bp, unidentified
  misc_feature 1..22: note = Description of Unknown:MG29-1-HPRT-target site-H5 sequence
  misc_feature 1..22: note = Category: DNA sequence of HPRT target site
  source 1..22: mol_type = genomic DNA; note = uncultivated organism sequence
ataaagctccatctctaaggca

SEQ ID NO: 5602 - DNA, 22 bp, unidentified
  misc_feature 1..22: note = Description of Unknown:MG29-1-HPRT-target site-A6 sequence
  misc_feature 1..22: note = Category: DNA sequence of HPRT target site
  source 1..22: mol_type = genomic DNA; note = uncultivated organism sequence
gtgataccttttctggagcatt

SEQ ID NO: 5603 - DNA, 22 bp, unidentified
  misc_feature 1..22: note = Description of Unknown:MG29-1-HPRT-target site-B6 sequence
  misc_feature 1..22: note = Category: DNA sequence of HPRT target site
  source 1..22: mol_type = genomic DNA; note = uncultivated organism sequence
ctggagcattcctgagttcagg

SEQ ID NO: 5604 - DNA, 22 bp, unidentified
  misc_feature 1..22: note = Description of Unknown:MG29-1-HPRT-target site-C6 sequence
  misc_feature 1..22: note = Category: DNA sequence of HPRT target site
  source 1..22: mol_type = genomic DNA; note = uncultivated organism sequence
tggagcattcctgagttcaggt

SEQ ID NO: 5605 - DNA, 22 bp, unidentified
  misc_feature 1..22: note = Description of Unknown:MG29-1-HPRT-target site-D6 sequence
  misc_feature 1..22: note = Category: DNA sequence of HPRT target site
  source 1..22: mol_type = genomic DNA; note = uncultivated organism sequence
tgctgtgattggcttgttatgt

SEQ ID NO: 5606 - DNA, 22 bp, unidentified
  misc_feature 1..22: note = Description of Unknown:MG29-1-HPRT-target site-E6 sequence
  misc_feature 1..22: note = Category: DNA sequence of HPRT target site
  source 1..22: mol_type = genomic DNA; note = uncultivated organism sequence
gctgtgattggcttgttatgtt

SEQ ID NO: 5607 - DNA, 22 bp, unidentified
  misc_feature 1..22: note = Description of Unknown:MG29-1-HPRT-target site-F6 sequence
  misc_feature 1..22: note = Category: DNA sequence of HPRT target site
  source 1..22: mol_type = genomic DNA; note = uncultivated organism sequence
ctgtgattggcttgttatgttc

SEQ ID NO: 5608 - DNA, 22 bp, unidentified
  misc_feature 1..22: note = Description of Unknown:MG29-1-HPRT-target site-G6 sequence
  misc_feature 1..22: note = Category: DNA sequence of HPRT target site
  source 1..22: mol_type = genomic DNA; note = uncultivated organism sequence
ttggaagagtcatgagggacat

SEQ ID NO: 5609 - DNA, 22 bp, unidentified
  misc_feature 1..22: note = Description of Unknown:MG29-1-HPRT-target site-H6 sequence
  misc_feature 1..22: note = Category: DNA sequence of HPRT target site
  source 1..22: mol_type = genomic DNA; note = uncultivated organism sequence
cagatgttaaaggcagtctcaa

SEQ ID NO: 5610 - DNA, 22 bp, unidentified
  misc_feature 1..22: note = Description of Unknown:MG29-1-HPRT-target site-A7 sequence
  misc_feature 1..22: note = Category: DNA sequence of HPRT target site
  source 1..22: mol_type = genomic DNA; note = uncultivated organism sequence
cttgagactgcctttaacatct

SEQ ID NO: 5611 - DNA, 22 bp, unidentified
  misc_feature 1..22: note = Description of Unknown:MG29-1-HPRT-target site-B7 sequence
  misc_feature 1..22: note = Category: DNA sequence of HPRT target site
  source 1..22: mol_type = genomic DNA; note = uncultivated organism sequence
ttgagactgcctttaacatctg

SEQ ID NO: 5612 - DNA, 22 bp, unidentified
  misc_feature 1..22: note = Description of Unknown:MG29-1-HPRT-target site-C7 sequence
  misc_feature 1..22: note = Category: DNA sequence of HPRT target site
  source 1..22: mol_type = genomic DNA; note = uncultivated organism sequence
taacccaaatgctgcctgttga

SEQ ID NO: 5613 - DNA, 22 bp, unidentified
  misc_feature 1..22: note = Description of Unknown:MG29-1-HPRT-target site-D7 sequence
  misc_feature 1..22: note = Category: DNA sequence of HPRT target site
  source 1..22: mol_type = genomic DNA; note = uncultivated organism sequence
ataacccaaatgctgcctgttg

SEQ ID NO: 5614 - DNA, 22 bp, unidentified
  misc_feature 1..22: note = Description of Unknown:MG29-1-HPRT-target site-E7 sequence
  misc_feature 1..22: note = Category: DNA sequence of HPRT target site
  source 1..22: mol_type = genomic DNA; note = uncultivated organism sequence
tcaacaggcagcatttgggtta

SEQ ID NO: 5615 - DNA, 22 bp, unidentified
  misc_feature 1..22: note = Description of Unknown:MG29-1-HPRT-target site-F7 sequence
  misc_feature 1..22: note = Category: DNA sequence of HPRT target site
  source 1..22: mol_type = genomic DNA; note = uncultivated organism sequence
caacaggcagcatttgggttat

SEQ ID NO: 5616 - DNA, 22 bp, unidentified
  misc_feature 1..22: note = Description of Unknown:MG29-1-HPRT-target site-G7 sequence
  misc_feature 1..22: note = Category: DNA sequence of HPRT target site
  source 1..22: mol_type = genomic DNA; note = uncultivated organism sequence
aacaggcagcatttgggttata

SEQ ID NO: 5617 - DNA, 22 bp, unidentified
  misc_feature 1..22: note = Description of Unknown:MG29-1-HPRT-target site-H7 sequence
  misc_feature 1..22: note = Category: DNA sequence of HPRT target site
  source 1..22: mol_type = genomic DNA; note = uncultivated organism sequence
gaacaaaagctggaggtggtat

SEQ ID NO: 5618 - DNA, 22 bp, unidentified
  misc_feature 1..22: note = Description of Unknown:MG29-1-HPRT-target site-A8 sequence
  misc_feature 1..22: note = Category: DNA sequence of HPRT target site
  source 1..22: mol_type = genomic DNA; note = uncultivated organism sequence
ggtagagttgacttataccacc

SEQ ID NO: 5619 - DNA, 22 bp, unidentified
  misc_feature 1..22: note = Description of Unknown:MG29-1-HPRT-target site-B8 sequence
  misc_feature 1..22: note = Category: DNA sequence of HPRT target site
  source 1..22: mol_type = genomic DNA; note = uncultivated organism sequence
gtagagttgacttataccacct

SEQ ID NO: 5620 - DNA, 22 bp, unidentified
  misc_feature 1..22: note = Description of Unknown:MG29-1-HPRT-target site-C8 sequence
  misc_feature 1..22: note = Category: DNA sequence of HPRT target site
  source 1..22: mol_type = genomic DNA; note = uncultivated organism sequence
ggaacaaaagctggaggtggta

SEQ ID NO: 5621 - DNA, 22 bp, unidentified
  misc_feature 1..22: note = Description of Unknown:MG29-1-HPRT-target site-D8 sequence
  misc_feature 1..22: note = Category: DNA sequence of HPRT target site
  source 1..22: mol_type = genomic DNA; note = uncultivated organism sequence
tggaacaaaagctggaggtggt

SEQ ID NO: 5622 - DNA, 22 bp, unidentified
  misc_feature 1..22: note = Description of Unknown:MG29-1-HPRT-target site-E8 sequence
  misc_feature 1..22: note = Category: DNA sequence of HPRT target site
  source 1..22: mol_type = genomic DNA; note = uncultivated organism sequence
tttttggaacaaaagctggagg

SEQ ID NO: 5623 - DNA, 22 bp, unidentified
  misc_feature 1..22: note = Description of Unknown:MG29-1-HPRT-target site-F8 sequence
  misc_feature 1..22: note = Category: DNA sequence of HPRT target site
  source 1..22: mol_type = genomic DNA; note = uncultivated organism sequence
gggtaaaacaactagtgtgcca

SEQ ID NO: 5624 - DNA, 22 bp, unidentified
  misc_feature 1..22: note = Description of Unknown:MG29-1-HPRT-target site-G8 sequence
  misc_feature 1..22: note = Category: DNA sequence of HPRT target site
  source 1..22: mol_type = genomic DNA; note = uncultivated organism sequence
ggcacactagttgttttaccct

SEQ ID NO: 5625 - DNA, 22 bp, unidentified
  misc_feature 1..22: note = Description of Unknown:MG29-1-HPRT-target site-H8 sequence
  misc_feature 1..22: note = Category: DNA sequence of HPRT target site
  source 1..22: mol_type = genomic DNA; note = uncultivated organism sequence
gcacactagttgttttacccta

SEQ ID NO: 5626 - DNA, 22 bp, unidentified
  misc_feature 1..22: note = Description of Unknown:MG29-1-HPRT-target site-A9 sequence
  misc_feature 1..22: note = Category: DNA sequence of HPRT target site
  source 1..22: mol_type = genomic DNA; note = uncultivated organism sequence
ccctaaagttcctctttgtaag

SEQ ID NO: 5627 - DNA, 22 bp, unidentified
  misc_feature 1..22: note = Description of Unknown:MG29-1-HPRT-target site-B9 sequence
  misc_feature 1..22: note = Category: DNA sequence of HPRT target site
  source 1..22: mol_type = genomic DNA; note = uncultivated organism sequence
gggattgtatttccaaggtttc

SEQ ID NO: 5628 - DNA, 22 bp, unidentified
  misc_feature 1..22: note = Description of Unknown:MG29-1-HPRT-target site-C9 sequence
  misc_feature 1..22: note = Category: DNA sequence of HPRT target site
  source 1..22: mol_type = genomic DNA; note = uncultivated organism sequence
caaggtttctagactgagagcc

SEQ ID NO: 5629 - DNA, 22 bp, unidentified
  misc_feature 1..22: note = Description of Unknown:MG29-1-HPRT-target site-D9 sequence
  misc_feature 1..22: note = Category: DNA sequence of HPRT target site
  source 1..22: mol_type = genomic DNA; note = uncultivated organism sequence
tagactgagagcccttttcatc

SEQ ID NO: 5630 - DNA, 22 bp, unidentified
  misc_feature 1..22: note = Description of Unknown:MG29-1-HPRT-target site-E9 sequence
  misc_feature 1..22: note = Category: DNA sequence of HPRT target site
  source 1..22: mol_type = genomic DNA; note = uncultivated organism sequence
catctttgctcattgacactct

SEQ ID NO: 5631 - DNA, 22 bp, unidentified
  misc_feature 1..22: note = Description of Unknown:MG29-1-HPRT-target site-F9 sequence
  misc_feature 1..22: note = Category: DNA sequence of HPRT target site
  source 1..22: mol_type = genomic DNA; note = uncultivated organism sequence
atctttgctcattgacactctg

SEQ ID NO: 5632 - DNA, 22 bp, unidentified
  misc_feature 1..22: note = Description of Unknown:MG29-1-HPRT-target site-G9 sequence
  misc_feature 1..22: note = Category: DNA sequence of HPRT target site
  source 1..22: mol_type = genomic DNA; note = uncultivated organism sequence
ctcattgacactctgtacccat

SEQ ID NO: 5633 - DNA, 22 bp, unidentified
  misc_feature 1..22: note = Description of Unknown:MG29-1-HPRT-target site-H9 sequence
  misc_feature 1..22: note = Category: DNA sequence of HPRT target site
  source 1..22: mol_type = genomic DNA; note = uncultivated organism sequence
acacacccaaggaaagactatg

SEQ ID NO: 5634 - DNA, 22 bp, unidentified
  misc_feature 1..22: note = Description of Unknown:MG29-1-HPRT-target site-A10 sequence
  misc_feature 1..22: note = Category: DNA sequence of HPRT target site
  source 1..22: mol_type = genomic DNA; note = uncultivated organism sequence
aacacacccaaggaaagactat

SEQ ID NO: 5635 - DNA, 22 bp, unidentified
  misc_feature 1..22: note = Description of Unknown:MG29-1-HPRT-target site-B10 sequence
  misc_feature 1..22: note = Category: DNA sequence of HPRT target site
  source 1..22: mol_type = genomic DNA; note = uncultivated organism sequence
gctctccatttcatagtctttc

SEQ ID NO: 5636 - DNA, 22 bp, unidentified
  misc_feature 1..22: note = Description of Unknown:MG29-1-HPRT-target site-C10 sequence
  misc_feature 1..22: note = Category: DNA sequence of HPRT target site
  source 1..22: mol_type = genomic DNA; note = uncultivated organism sequence
atagtctttccttgggtgtgtt

SEQ ID NO: 5637 - DNA, 22 bp, unidentified
  misc_feature 1..22: note = Description of Unknown:MG29-1-HPRT-target site-D10 sequence
  misc_feature 1..22: note = Category: DNA sequence of HPRT target site
  source 1..22: mol_type = genomic DNA; note = uncultivated organism sequence
cttgggtgtgttaaaagtgacc

SEQ ID NO: 5638 - DNA, 22 bp, unidentified
  misc_feature 1..22: note = Description of Unknown:MG29-1-HPRT-target site-E10 sequence
  misc_feature 1..22: note = Category: DNA sequence of HPRT target site
  source 1..22: mol_type = genomic DNA; note = uncultivated organism sequence
atccgtgctgagtgtaccatgg

SEQ ID NO: 5639 - DNA, 22 bp, unidentified
  misc_feature 1..22: note = Description of Unknown:MG29-1-HPRT-target site-F10 sequence
  misc_feature 1..22: note = Category: DNA sequence of HPRT target site
  source 1..22: mol_type = genomic DNA; note = uncultivated organism sequence
atttcatccgtgctgagtgtac

SEQ ID NO: 5640 - DNA, 22 bp, unidentified
  misc_feature 1..22: note = Description of Unknown:MG29-1-HPRT-target site-G10 sequence
  misc_feature 1..22: note = Category: DNA sequence of HPRT target site
  source 1..22: mol_type = genomic DNA; note = uncultivated organism sequence
gaaacgtcagtcttctcttttg

SEQ ID NO: 5641 - DNA, 22 bp, unidentified
  misc_feature 1..22: note = Description of Unknown:MG29-1-HPRT-target site-H10 sequence
  misc_feature 1..22: note = Category: DNA sequence of HPRT target site
  source 1..22: mol_type = genomic DNA; note = uncultivated organism sequence
tagagaggcacatttgccagta

SEQ ID NO: 5642 - RNA, 40 nt, synthetic construct
  misc_feature 1..40: note = Category: MG29-1 sgRNA targeting human TRBC1/2
  misc_feature 1..40: note = Description: MG29-1-TRBC1/2-sgRNA-A1
  source 1..40: mol_type = other RNA
taatttctactgttgtagatagccatcagaagcagagatc

SEQ ID NO: 5643 - RNA, 40 nt, synthetic construct
  misc_feature 1..40: note = Category: MG29-1 sgRNA targeting human TRBC1/2
  misc_feature 1..40: note = Description: MG29-1-TRBC1/2-sgRNA-B1
  source 1..40: mol_type = other RNA
taatttctactgttgtagatggtgtgggagatctctgctt

SEQ ID NO: 5644 - RNA, 40 nt, synthetic construct
  misc_feature 1..40: note = Category: MG29-1 sgRNA targeting human TRBC1/2
  misc_feature 1..40: note = Description: MG29-1-TRBC1/2-sgRNA-C1
  source 1..40: mol_type = other RNA
taatttctactgttgtagatgggtgtgggagatctctgct

SEQ ID NO: 5645 - RNA, 40 nt, synthetic construct
  misc_feature 1..40: note = Category: MG29-1 sgRNA targeting human TRBC1/2
  misc_feature 1..40: note = Description: MG29-1-TRBC1/2-sgRNA-D1
  source 1..40: mol_type = other RNA
taatttctactgttgtagatgccctatcctgggtccactc

SEQ ID NO: 5646 - RNA, 40 nt, synthetic construct
  misc_feature 1..40: note = Category: MG29-1 sgRNA targeting human TRBC1/2
  misc_feature 1..40: note = Description: MG29-1-TRBC1/2-sgRNA-E1
  source 1..40: mol_type = other RNA
taatttctactgttgtagattttcagactgtggctttacc

SEQ ID NO: 5647 - RNA, 40 nt, synthetic construct
  misc_feature 1..40: note = Category: MG29-1 sgRNA targeting human TRBC1/2
  misc_feature 1..40: note = Description: MG29-1-TRBC1/2-sgRNA-F1
  source 1..40: mol_type = other RNA
taatttctactgttgtagatagactgtggctttacctcgg

SEQ ID NO: 5648 - RNA, 40 nt, synthetic construct
  misc_feature 1..40: note = Category: MG29-1 sgRNA targeting human TRBC1/2
  misc_feature 1..40: note = Description: MG29-1-TRBC1/2-sgRNA-G1
  source 1..40: mol_type = other RNA
taatttctactgttgtagattcttctgcaggtcaagagaa

SEQ ID NO: 5649 - RNA, 40 nt, synthetic construct
  misc_feature 1..40: note = Category: MG29-1 sgRNA targeting human TRBC1/2
  misc_feature 1..40: note = Description: MG29-1-TRBC1/2-sgRNA-H1
  source 1..40: mol_type = other RNA
taatttctactgttgtagattcttgacctgcagaagagaa

SEQ ID NO: 5650 - RNA, 40 nt, synthetic construct
  misc_feature 1..40: note = Category: MG29-1 sgRNA targeting human TRBC1/2
  misc_feature 1..40: note = Description: MG29-1-TRBC1/2-sgRNA-A2
  source 1..40: mol_type = other RNA
taatttctactgttgtagataggtcctctggaaagggaag

SEQ ID NO: 5651 - RNA, 40 nt, synthetic construct
  misc_feature 1..40: note = Category: MG29-1 sgRNA targeting human TRBC1/2
  misc_feature 1..40: note = Description: MG29-1-TRBC1/2-sgRNA-B2
  source 1..40: mol_type = other RNA
taatttctactgttgtagatcaggtcctctggaaagggaa

SEQ ID NO: 5652 - RNA, 40 nt, synthetic construct
  misc_feature 1..40: note = Category: MG29-1 sgRNA targeting human TRBC1/2
  misc_feature 1..40: note = Description: MG29-1-TRBC1/2-sgRNA-C2
  source 1..40: mol_type = other RNA
taatttctactgttgtagattcaggtcctctggaaaggga

SEQ ID NO: 5653 - RNA, 40 nt, synthetic construct; identical to SEQ ID NO: 5642
  misc_feature 1..40: note = Category: MG29-1 sgRNA targeting human TRBC1/2
  misc_feature 1..40: note = Description: MG29-1-TRBC1/2-sgRNA-D2
  source 1..40: mol_type = other RNA

SEQ ID NO: 5654 - RNA, 40 nt, synthetic construct; identical to SEQ ID NO: 5643
  misc_feature 1..40: note = Category: MG29-1 sgRNA targeting human TRBC1/2
  misc_feature 1..40: note = Description: MG29-1-TRBC1/2-sgRNA-E2
  source 1..40: mol_type = other RNA

SEQ ID NO: 5655 - RNA, 40 nt, synthetic construct; identical to SEQ ID NO: 5644
  misc_feature 1..40: note = Category: MG29-1 sgRNA targeting human TRBC1/2
  misc_feature 1..40: note = Description: MG29-1-TRBC1/2-sgRNA-F2
  source 1..40: mol_type = other RNA

SEQ ID NO: 5656 - RNA, 40 nt, synthetic construct; identical to SEQ ID NO: 5645
  misc_feature 1..40: note = Category: MG29-1 sgRNA targeting human TRBC1/2
  misc_feature 1..40: note = Description: MG29-1-TRBC1/2-sgRNA-G2
  source 1..40: mol_type = other RNA

SEQ ID NO: 5657 - RNA, 40 nt, synthetic construct
  misc_feature 1..40: note = Category: MG29-1 sgRNA targeting human TRBC1/2
  misc_feature 1..40: note = Description: MG29-1-TRBC1/2-sgRNA-H2
  source 1..40: mol_type = other RNA
taatttctactgttgtagatctttcagactgtggcttcac

SEQ ID NO: 5658 - RNA, 40 nt, synthetic construct
  misc_feature 1..40: note = Category: MG29-1 sgRNA targeting human TRBC1/2
  misc_feature 1..40: note = Description: MG29-1-TRBC1/2-sgRNA-A3
  source 1..40: mol_type = other RNA
taatttctactgttgtagattttcagactgtggcttcacc

SEQ ID NO: 5659 - RNA, 40 nt, synthetic construct
  misc_feature 1..40: note = Category: MG29-1 sgRNA targeting human TRBC1/2
  misc_feature 1..40: note = Description: MG29-1-TRBC1/2-sgRNA-B3
  source 1..40: mol_type = other RNA
taatttctactgttgtagatagactgtggcttcacctccg

SEQ ID NO: 5660 - RNA, 40 nt, synthetic construct
  misc_feature 1..40: note = Category: MG29-1 sgRNA targeting human TRBC1/2
  misc_feature 1..40: note = Description: MG29-1-TRBC1/2-sgRNA-C3
  source 1..40: mol_type = other RNA
taatttctactgttgtagattcttgacctgtggaagagag

SEQ ID NO: 5661 - DNA, 20 bp, unidentified
  misc_feature 1..20: note = Description of Unknown:MG29-1-TRBC1/2-target site-A1 sequence
  misc_feature 1..20: note = Category: DNA sequence of TRBC1/2 target site
  source 1..20: mol_type = genomic DNA; note = uncultivated organism sequence
agccatcagaagcagagatc

SEQ ID NO: 5662 - DNA, 20 bp, unidentified
  misc_feature 1..20: note = Description of Unknown:MG29-1-TRBC1/2-target site-B1 sequence
  misc_feature 1..20: note = Category: DNA sequence of TRBC1/2 target site
  source 1..20: mol_type = genomic DNA; note = uncultivated organism sequence
ggtgtgggagatctctgctt

SEQ ID NO: 5663 - DNA, 20 bp, unidentified
  misc_feature 1..20: note = Description of Unknown:MG29-1-TRBC1/2-target site-C1 sequence
  misc_feature 1..20: note = Category: DNA sequence of TRBC1/2 target site
  source 1..20: mol_type = genomic DNA; note = uncultivated organism sequence
gggtgtgggagatctctgct

SEQ ID NO: 5664 - DNA, 20 bp, unidentified
  misc_feature 1..20: note = Description of Unknown:MG29-1-TRBC1/2-target site-D1 sequence
  misc_feature 1..20: note = Category: DNA sequence of TRBC1/2 target site
  source 1..20: mol_type = genomic DNA; note = uncultivated organism sequence
gccctatcctgggtccactc

SEQ ID NO: 5665 - DNA, 20 bp, unidentified
  misc_feature 1..20: note = Description of Unknown:MG29-1-TRBC1/2-target site-E1 sequence
  misc_feature 1..20: note = Category: DNA sequence of TRBC1/2 target site
  source 1..20: mol_type = genomic DNA; note = uncultivated organism sequence
tttcagactgtggctttacc

SEQ ID NO: 5666 - DNA, 20 bp, unidentified
  misc_feature 1..20: note = Description of Unknown:MG29-1-TRBC1/2-target site-F1 sequence
  misc_feature 1..20: note = Category: DNA sequence of TRBC1/2 target site
  source 1..20: mol_type = genomic DNA; note = uncultivated organism sequence
agactgtggctttacctcgg

SEQ ID NO: 5667 - DNA, 20 bp, unidentified
  misc_feature 1..20: note = Description of Unknown:MG29-1-TRBC1/2-target site-G1 sequence
  misc_feature 1..20: note = Category: DNA sequence of TRBC1/2 target site
  source 1..20: mol_type = genomic DNA; note = uncultivated organism sequence
tcttctgcaggtcaagagaa

SEQ ID NO: 5668 - DNA, 20 bp, unidentified
  misc_feature 1..20: note = Description of Unknown:MG29-1-TRBC1/2-target site-H1 sequence
  misc_feature 1..20: note = Category: DNA sequence of TRBC1/2 target site
  source 1..20: mol_type = genomic DNA; note = uncultivated organism sequence
tcttgacctgcagaagagaa

SEQ ID NO: 5669 - DNA, 20 bp, unidentified
  misc_feature 1..20: note = Description of Unknown:MG29-1-TRBC1/2-target site-A2 sequence
  misc_feature 1..20: note = Category: DNA sequence of TRBC1/2 target site
  source 1..20: mol_type = genomic DNA; note = uncultivated organism sequence
aggtcctctggaaagggaag

SEQ ID NO: 5670 - DNA, 20 bp, unidentified
  misc_feature 1..20: note = Description of Unknown:MG29-1-TRBC1/2-target site-B2 sequence
  misc_feature 1..20: note = Category: DNA sequence of TRBC1/2 target site
  source 1..20: mol_type = genomic DNA; note = uncultivated organism sequence
caggtcctctggaaagggaa

SEQ ID NO: 5671 - DNA, 20 bp, unidentified
  misc_feature 1..20: note = Description of Unknown:MG29-1-TRBC1/2-target site-C2 sequence
  misc_feature 1..20: note = Category: DNA sequence of TRBC1/2 target site
  source 1..20: mol_type = genomic DNA; note = uncultivated organism sequence
tcaggtcctctggaaaggga

SEQ ID NO: 5672 - DNA, 20 bp, unidentified
  misc_feature 1..20: note = Description of Unknown:MG29-1-TRBC1/2-target site-D2 sequence
  misc_feature 1..20: note = Category: DNA sequence of TRBC1/2 target site
  source 1..20: mol_type = genomic DNA; note = uncultivated organism sequence
agccatcagaagcagagatc

SEQ ID NO: 5673 - DNA, 20 bp, unidentified
  misc_feature 1..20: note = Description of Unknown:MG29-1-TRBC1/2-target site-E2 sequence
  misc_feature 1..20: note = Category: DNA sequence of TRBC1/2 target site
  source 1..20: mol_type = genomic DNA; note = uncultivated organism sequence
ggtgtgggagatctctgctt

SEQ ID NO: 5674 - DNA, 20 bp, unidentified
  misc_feature 1..20: note = Description of Unknown:MG29-1-TRBC1/2-target site-F2 sequence
  misc_feature 1..20: note = Category: DNA sequence of TRBC1/2 target site
  source 1..20: mol_type = genomic DNA; note = uncultivated organism sequence
gggtgtgggagatctctgct

SEQ ID NO: 5675 - DNA, 20 bp, unidentified
  misc_feature 1..20: note = Description of Unknown:MG29-1-TRBC1/2-target site-G2 sequence
  misc_feature 1..20: note = Category: DNA sequence of TRBC1/2 target site
  source 1..20: mol_type = genomic DNA; note = uncultivated organism sequence
gccctatcctgggtccactc

SEQ ID NO: 5676 - DNA, 20 bp, unidentified
  misc_feature 1..20: note = Description of Unknown:MG29-1-TRBC1/2-target site-H2 sequence
  misc_feature 1..20: note = Category: DNA sequence of TRBC1/2 target site
  source 1..20: mol_type = genomic DNA; note = uncultivated organism sequence
ctttcagactgtggcttcac

SEQ ID NO: 5677 - DNA, 20 bp, unidentified
  misc_feature 1..20: note = Description of Unknown:MG29-1-TRBC1/2-target site-A3 sequence
  misc_feature 1..20: note = Category: DNA sequence of TRBC1/2 target site
  source 1..20: mol_type = genomic DNA; note = uncultivated organism sequence
tttcagactgtggcttcacc

SEQ ID NO: 5678 - DNA, 20 bp, unidentified
  misc_feature 1..20: note = Description of Unknown:MG29-1-TRBC1/2-target site-B3 sequence
  misc_feature 1..20: note = Category: DNA sequence of TRBC1/2 target site
  source 1..20: mol_type = genomic DNA; note = uncultivated organism sequence
agactgtggcttcacctccg

SEQ ID NO: 5679 - DNA, 20 bp, unidentified
  misc_feature 1..20: note = Description of Unknown:MG29-1-TRBC1/2-target site-C3 sequence
  misc_feature 1..20: note = Category: DNA sequence of TRBC1/2 target site
  source 1..20: mol_type = genomic DNA; note = uncultivated organism sequence
tcttgacctgtggaagagag

SEQ ID NO: 5680 - RNA, 4212 nt, synthetic construct
  misc_feature 1..4212: note = Category: MG29-1 containing 5'UTR, NLS, CDS, NLS, 3'UTR,polyA tail
  misc_feature 1..4212: note = Description: MG29-1 mRNA
  source 1..4212: mol_type = other RNA
gaaaagccagctccagcaggcgctgctcactcctccccatcctctccctctgtccctctgtccctctgaccctgcactgtcccagcaccatggcccctaagaagaagagaaaagtcggcggaggcggcagcttcaacaacttcatcaagaagtacagcctgcagaaaaccctgcgcttcgagctgaagcctgtgggcgagacagccgactacatcgaggacttcaagagcgagtacctgaaggacaccgtgctgaaggacgagcagagagccaaggactaccaagagatcaagaccctgatcgacgattaccaccgcgagtacatcgaagagtgcctgagagaacccgtggacaagaaaaccggcgagatcctggacttcacccaggacctggaagatgccttcagctactaccagaagctgaaagagaaccccaccgagaacagagtcggctgggagaaagagcaagagagcctgaggaagaagctggtcacctccttcgtgggcaacgacggcctgttcaagaaagagttcatcaccagggacctgcctgagtggctgcagaagaaaggactctggggcgagtacaaggacacagtggaaaacttcaagaagttcaccacctacttcagcggcttccacgagaaccggaagaacatgtacaccgccgaggctcagagcaccgctatcgccaacagactgatgaacgacaacctgcctaagttctttaacaactacctggcctaccagaccatcaaagagaagcaccccgacctggtgttcagactggatgatgctctgctgcaggccgctggcgtggaacatctggatgaggctttccagcctagatacttcagcagactgttcgcccagagcggcatcaccgctttcaacgagctgatcggcggcagaaccacagagaacggcgagaagatccagggcctgaacgagcagatcaacctgtacagacagcagaaccccgagaaggccaagggcttccccagattcatgcctctgttcaagcagatcctgagcgacagagagacacacagctttctgcccgacgccttcgagaacgacaaagagctgctccaggctctgagagactacgtggacgccgccacatctgaggaaggcatgatcagccagctgaacaaggccatgaaccagttcgtgaccgccgacctgaagagagtgtacatcaagagcgccgctctgaccagcctgagccaagagctgttccacttcttcggcgtgatcagcgacgctatcgcttggtacgccgagaagagactgagccccaagaaggcccaagagtctttcctgaagcaagaggtgtacgccatcgaggaactgaaccaggctgtcgtgggctacatcgaccagctggaagatcagagcgagctgcagcaactgctggtggacctgccagatcctcagaaacccgtgtccagcttcatcctgacacactggcagaagtctcaagagcccctgcaggcagtgatcgccaaggtggaacctctgttcgaactggaagaactgagcaagaacaagagggccccaaagcacgacaaggaccaaggcggcgagggatttcagcaggtcgacgccatcaagaacatgctggacgccttcatggaagtgtcccacgctatcaagcccctgtacctggtcaagggaagaaaggccatcgacatgcccgacgtggacaccggcttctacgctgatttcgccgaggcctacagcgcctacgagcaagtgacagtgtccctgtacaacaagaccagaaaccacctgtccaagaagcccttcagcaaggacaagatcaagatcaacttcgacgcccctacactgctgaacggctgggacctgaacaaagagagcgacaacaagtccatcatcctgcggaaggacggcaacttctacctggcaatcatgcaccccaagcacaccaaggtgttcgactgctactctgcctctgaggctgccggcaagtgctacgagaagatgaactacaagctgctgagcggcgccaacaagatgctgcctaaggtgttctttagcaagaagggcatcgagacattcagccctccacaagaaatcctggacctgtacaagaacaacgagcataagaagggcgccaccttcaagctggaatcctgccacaagctgatcgatttcttcaagcggaacatccccaagtacaaggtgcaccctaccgacaactttggctgggacgtgttcggctttcacttcagccctaccagcagctacggcgacctgtctggcttctacagagaggtggaagcccagggatacaagctgtggttcagcgacgtgtccgaggcttacatcaacaaatgcgtggaagagggcaagctgttcctgttccaaatctacaacaaggacttctcccctaactccaccggcaagcccaacctgcacaccctgtattggaagggcctgttcgagcccgagaacctgaaagacgtggtgctgaagctgaatggcgaggccgagatcttctaccggaagcacagcatcaagcacgaggacaagaccatccacagagctaaggaccctatcgctaacaagaacgctgacaaccccaagaaacagagcgtgttcgattacgacatcatcaaggataagcggtatacccaggacaagttcttcttccacgtgccaatcagcctgaacttcaaaagccagggcgtcgtgcggttcaacgataagatcaacggcctgctggccgctcaggacgatgtgcatgtgatcggcatcgacagaggcgagagacatctgctgtactacaccgtggtcaacggcaagggcgaagtggtggaacagggcagcctgaatcaggtggccacagatcagggctacgtggtggattaccagcagaagctgcacgccaaagagaaagaacgcgaccaggccagaaagaactggtccaccatcgagaacatcaaagaactgaaggccggctacctgagccaggtggtgcataagctggctcagctgatcgtgaagcacaacgccatcgtgtgcctcgaggacctgaatttcggcttcaagaggggcagattcaaggtcgagaaacaggtgtaccagaagttcgagaaggctctgatcgacaagctgaactacctcgtgttcaaagagagaggcgccacacaggctggcggatacctgaatgcttaccagctggccgcacctttcgagagctttgagaagctgggcaagcagaccggcatcctgtactacgtgcggagcgactacaccagcaagatcgaccctgctaccggcttcgtggactttctgaagcctaagtacgagagcatggccaagagcaaagtgttcttcgagtccttcgagcgcatccagtggaaccaggccaaaggctacttcgagttcgagtttgactacaagaagatgtgccccagcagaaagttcggcgactacagaaccagatgggtcgtgtgcaccttcggcgacacccgctaccagaacagaagaaacaagagcagcggccagtgggagacagagacaatcgatgtgacagcccagctgaaagccctgttcgccgcttacggcatcacatacaatcaagaggataacatcaaggacgccattgccgccgtgaagtacaccaagttctacaagcagctgtactggctgctgagactgaccctgagcctgagacacagcgtgacaggcaccgacgaggatttcatcctgtctccagtggccgacgagaatggcgtgttctttgactctaggaaggccaccgacaagcagcctaaggacgctgatgctaacggcgcctaccatatcgccctgaaaggcctgtggaatctccagcagatcagacagcacgactggaacgtggaaaagcccaaaaagctgaacctcgccatgaagaacgaagagtggttcggcttcgctcagaagaagaagtttagagccagcggcggcaagaggcctgccgctacaaaaaaagccggccaggccaagaaaaagaagtgaccacacccccattcccccactccagatagaacttcagttatatctcacgtgtctggagttggatcccttgaagactaaaaaaaaaaaaaaaaaaaaaaaaaaaaaaaaaaaaaaaaaaaaaaaaaaaaaaaaaaaaaaaaaaaaaaaaaaaaaaaaaaaaaaaaaaaaaaaaaaaaaaaaaaaa

SEQ ID NO: 5681 - RNA, 42 nt, synthetic construct; identical to SEQ ID NO: 4404
  misc_feature 1..42: note = Category: MG29-1 sgRNA targeting TRAC
  misc_feature 1..42: note = Description: MG29-1-TRAC-sgRNA-35
  source 1..42: mol_type = other RNA

SEQ ID NO: 5682 - DNA, 22 bp, unidentified
  misc_feature 1..22: note = Description of Unknown:MG29-1-TRAC-target site-35 sequence
  misc_feature 1..22: note = Category: DNA sequence of TRAC target site
  source 1..22: mol_type = genomic DNA; note = uncultivated organism sequence
gagtctctcagctggtacacgg

SEQ ID NO: 5683 - RNA, 42 nt, synthetic construct; identical to SEQ ID NO: 4404
  misc_feature 1..42: note = Category: MG29-1 sgRNA targeting TRAC
  misc_feature 1..42: note = Description: MG29-1-TRAC-sgRNA-35-AltR
  source 1..42: mol_type = other RNA

SEQ ID NO: 5684 - DNA, 22 bp, unidentified
  misc_feature 1..22: note = Description of Unknown:MG29-1-TRAC-target site-35-AltR sequence
  misc_feature 1..22: note = Category: DNA sequence of TRAC target site
  source 1..22: mol_type = genomic DNA; note = uncultivated organism sequence
gagtctctcagctggtacacgg

SEQ ID NO: 5685 - RNA, 46 nt, synthetic construct
  misc_feature 1..46: note = Category: MG29-1 sgRNA targeting CD38
  misc_feature 1..46: note = Description: MG29-1-CD38-sgRNA
  source 1..46: mol_type = other RNA
cttttaatttctactgttgtagatccgagaccgtcctggcgcgatg

SEQ ID NO: 5686 - DNA, 22 bp, unidentified
  misc_feature 1..22: note = Description of Unknown:MG29-1-CD38-target site sequence
  misc_feature 1..22: note = Category: DNA sequence of CD38 target site
  source 1..22: mol_type = genomic DNA; note = uncultivated organism sequence
ccgagaccgtcctggcgcgatg

SEQ ID NO: 5687 - DNA, 3939 bp, synthetic construct
  misc_feature 1..3939: note = Category: MG29-1 coding sequence used for generation of mRNA
  misc_feature 1..3939: note = Description: MG29-1-mRNA coding sequence
  source 1..3939: mol_type = other DNA
atggcccctaagaagaagagaaaagtcggcggaggcggcagcttcaacaacttcatcaagaagtacagcctgcagaaaaccctgcgcttcgagctgaagcctgtgggcgagacagccgactacatcgaggacttcaagagcgagtacctgaaggacaccgtgctgaaggacgagcagagagccaaggactaccaagagatcaagaccctgatcgacgattaccaccgcgagtacatcgaagagtgcctgagagaacccgtggacaagaaaaccggcgagatcctggacttcacccaggacctggaagatgccttcagctactaccagaagctgaaagagaaccccaccgagaacagagtcggctgggagaaagagcaagagagcctgaggaagaagctggtcacctccttcgtgggcaacgacggcctgttcaagaaagagttcatcaccagggacctgcctgagtggctgcagaagaaaggactctggggcgagtacaaggacacagtggaaaacttcaagaagttcaccacctacttcagcggcttccacgagaaccggaagaacatgtacaccgccgaggctcagagcaccgctatcgccaacagactgatgaacgacaacctgcctaagttctttaacaactacctggcctaccagaccatcaaagagaagcaccccgacctggtgttcagactggatgatgctctgctgcaggccgctggcgtggaacatctggatgaggctttccagcctagatacttcagcagactgttcgcccagagcggcatcaccgctttcaacgagctgatcggcggcagaaccacagagaacggcgagaagatccagggcctgaacgagcagatcaacctgtacagacagcagaaccccgagaaggccaagggcttccccagattcatgcctctgttcaagcagatcctgagcgacagagagacacacagctttctgcccgacgccttcgagaacgacaaagagctgctccaggctctgagagactacgtggacgccgccacatctgaggaaggcatgatcagccagctgaacaaggccatgaaccagttcgtgaccgccgacctgaagagagtgtacatcaagagcgccgctctgaccagcctgagccaagagctgttccacttcttcggcgtgatcagcgacgctatcgcttggtacgccgagaagagactgagccccaagaaggcccaagagtctttcctgaagcaagaggtgtacgccatcgaggaactgaaccaggctgtcgtgggctacatcgaccagctggaagatcagagcgagctgcagcaactgctggtggacctgccagatcctcagaaacccgtgtccagcttcatcctgacacactggcagaagtctcaagagcccctgcaggcagtgatcgccaaggtggaacctctgttcgaactggaagaactgagcaagaacaagagggccccaaagcacgacaaggaccaaggcggcgagggatttcagcaggtcgacgccatcaagaacatgctggacgccttcatggaagtgtcccacgctatcaagcccctgtacctggtcaagggaagaaaggccatcgacatgcccgacgtggacaccggcttctacgctgatttcgccgaggcctacagcgcctacgagcaagtgacagtgtccctgtacaacaagaccagaaaccacctgtccaagaagcccttcagcaaggacaagatcaagatcaacttcgacgcccctacactgctgaacggctgggacctgaacaaagagagcgacaacaagtccatcatcctgcggaaggacggcaacttctacctggcaatcatgcaccccaagcacaccaaggtgttcgactgctactctgcctctgaggctgccggcaagtgctacgagaagatgaactacaagctgctgagcggcgccaacaagatgctgcctaaggtgttctttagcaagaagggcatcgagacattcagccctccacaagaaatcctggacctgtacaagaacaacgagcataagaagggcgccaccttcaagctggaatcctgccacaagctgatcgatttcttcaagcggaacatccccaagtacaaggtgcaccctaccgacaactttggctgggacgtgttcggctttcacttcagccctaccagcagctacggcgacctgtctggcttctacagagaggtggaagcccagggatacaagctgtggttcagcgacgtgtccgaggcttacatcaacaaatgcgtggaagagggcaagctgttcctgttccaaatctacaacaaggacttctcccctaactccaccggcaagcccaacctgcacaccctgtattggaagggcctgttcgagcccgagaacctgaaagacgtggtgctgaagctgaatggcgaggccgagatcttctaccggaagcacagcatcaagcacgaggacaagaccatccacagagctaaggaccctatcgctaacaagaacgctgacaaccccaagaaacagagcgtgttcgattacgacatcatcaaggataagcggtatacccaggacaagttcttcttccacgtgccaatcagcctgaacttcaaaagccagggcgtcgtgcggttcaacgataagatcaacggcctgctggccgctcaggacgatgtgcatgtgatcggcatcgacagaggcgagagacatctgctgtactacaccgtggtcaacggcaagggcgaagtggtggaacagggcagcctgaatcaggtggccacagatcagggctacgtggtggattaccagcagaagctgcacgccaaagagaaagaacgcgaccaggccagaaagaactggtccaccatcgagaacatcaaagaactgaaggccggctacctgagccaggtggtgcataagctggctcagctgatcgtgaagcacaacgccatcgtgtgcctcgaggacctgaatttcggcttcaagaggggcagattcaaggtcgagaaacaggtgtaccagaagttcgagaaggctctgatcgacaagctgaactacctcgtgttcaaagagagaggcgccacacaggctggcggatacctgaatgcttaccagctggccgcacctttcgagagctttgagaagctgggcaagcagaccggcatcctgtactacgtgcggagcgactacaccagcaagatcgaccctgctaccggcttcgtggactttctgaagcctaagtacgagagcatggccaagagcaaagtgttcttcgagtccttcgagcgcatccagtggaaccaggccaaaggctacttcgagttcgagtttgactacaagaagatgtgccccagcagaaagttcggcgactacagaaccagatgggtcgtgtgcaccttcggcgacacccgctaccagaacagaagaaacaagagcagcggccagtgggagacagagacaatcgatgtgacagcccagctgaaagccctgttcgccgcttacggcatcacatacaatcaagaggataacatcaaggacgccattgccgccgtgaagtacaccaagttctacaagcagctgtactggctgctgagactgaccctgagcctgagacacagcgtgacaggcaccgacgaggatttcatcctgtctccagtggccgacgagaatggcgtgttctttgactctaggaaggccaccgacaagcagcctaaggacgctgatgctaacggcgcctaccatatcgccctgaaaggcctgtggaatctccagcagatcagacagcacgactggaacgtggaaaagcccaaaaagctgaacctcgccatgaagaacgaagagtggttcggcttcgctcagaagaagaagtttagagccagcggcggcaagaggcctgccgctacaaaaaaagccggccaggccaagaaaaagaagtga

SEQ ID NO: 5688 - RNA, 46 nt, synthetic construct; identical to SEQ ID NO: 4299
  misc_feature 1..46: note = Category: MG29-1 sgRNA targeting mouse albumin
  misc_feature 1..46: note = Description: mAlb29-8-44
  source 1..46: mol_type = other RNA

SEQ ID NO: 5689 - RNA, 70 nt, synthetic construct
  misc_feature 1..70: note = Category: MG29-1 sgRNA targeting mouse albumin
  misc_feature 1..70: note = Description: mAlb29-8-50
  source 1..70: mol_type = other RNA
gttgagaatcgaaagattctcaaccttttaatttctactgttgtagatctgtaacgatcgggaactggca

SEQ ID NO: 5690 - RNA, 68 nt, synthetic construct
  misc_feature 1..68: note = Category: MG29-1 sgRNA targeting mouse albumin
  misc_feature 1..68: note = Description: mAlb29-8-50b
  source 1..68: mol_type = other RNA
gttgagaatcgaaagattctcaaccttttaatttctactgttgtagatctgtaacgatcgggaactgg

SEQ ID NO: 5691 - RNA, 68 nt, synthetic construct; identical to SEQ ID NO: 5690
  misc_feature 1..68: note = Category: MG29-1 sgRNA targeting mouse albumin
  misc_feature 1..68: note = Description: mAlb29-8-51b
  source 1..68: mol_type = other RNA

SEQ ID NO: 5692 - RNA, 68 nt, synthetic construct; identical to SEQ ID NO: 5690
  misc_feature 1..68: note = Category: MG29-1 sgRNA targeting mouse albumin
  misc_feature 1..68: note = Description: mAlb29-8-52b
  source 1..68: mol_type = other RNA

SEQ ID NO: 5693 - RNA, 68 nt, synthetic construct; identical to SEQ ID NO: 5690
  misc_feature 1..68: note = Category: MG29-1 sgRNA targeting mouse albumin
  misc_feature 1..68: note = Description: mAlb29-8-53b
  source 1..68: mol_type = other RNA

SEQ ID NO: 5694 - RNA, 68 nt, synthetic construct; identical to SEQ ID NO: 5690
  misc_feature 1..68: note = Category: MG29-1 sgRNA targeting mouse albumin
  misc_feature 1..68: note = Description: mAlb29-8-54b
  source 1..68: mol_type = other RNA

SEQ ID NO: 5695 - RNA, 46 nt, synthetic construct
  misc_feature 1..46: note = Category: Guide modification chemistry
  misc_feature 1..46: note = Description: Chemistry 44 (22 nt spacer)
  misc_difference 25..46: note = any nucleotide
  source 1..46: mol_type = other RNA
cttttaatttctactgttgtagatnnnnnnnnnnnnnnnnnnnnnn

SEQ ID NO: 5696 - RNA, 70 nt, synthetic construct
  misc_feature 1..70: note = Category: Guide modification chemistry
  misc_feature 1..70: note = Description: Chemistry 50 (22 nt spacer)
  misc_difference 49..70: note = any nucleotide
  source 1..70: mol_type = other RNA
gttgagaatcgaaagattctcaaccttttaatttctactgttgtagatnnnnnnnnnnnnnnnnnnnnnn

SEQ ID NO: 5697 - RNA, 68 nt, synthetic construct
  misc_feature 1..68: note = Category: Guide modification chemistry
  misc_feature 1..68: note = Description: Chemistry 50 (20 nt spacer)
  misc_difference 49..68: note = any nucleotide
  source 1..68: mol_type = other RNA
gttgagaatcgaaagattctcaaccttttaatttctactgttgtagatnnnnnnnnnnnnnnnnnnnn

SEQ ID NO: 5698 - RNA, 68 nt, synthetic construct; identical to SEQ ID NO: 5697
  misc_feature 1..68: note = Category: Guide modification chemistry
  misc_feature 1..68: note = Description: Chemistry 51 (20 nt spacer)
  misc_difference 49..68: note = any nucleotide
  source 1..68: mol_type = other RNA

SEQ ID NO: 5699 - RNA, 68 nt, synthetic construct; identical to SEQ ID NO: 5697
  misc_feature 1..68: note = Category: Guide modification chemistry
  misc_feature 1..68: note = Description: Chemistry 52 (20 nt spacer)
  misc_difference 49..68: note = any nucleotide
  source 1..68: mol_type = other RNA

SEQ ID NO: 5700 - RNA, 68 nt, synthetic construct; identical to SEQ ID NO: 5697
  misc_feature 1..68: note = Category: Guide modification chemistry
  misc_feature 1..68: note = Description: Chemistry 53 (20 nt spacer)
  misc_difference 49..68: note = any nucleotide
  source 1..68: mol_type = other RNA

SEQ ID NO: 5701 - RNA, 68 nt, synthetic construct; identical to SEQ ID NO: 5697
  misc_feature 1..68: note = Category: Guide modification chemistry
  misc_feature 1..68: note = Description: Chemistry 54 (20 nt spacer)
  misc_difference 49..68: note = any nucleotide
  source 1..68: mol_type = other RNA

SEQ ID NO: 5702 - RNA, 46 nt, synthetic construct; identical to SEQ ID NO: 4299
  misc_feature 1..46: note = Category: MG29-1 sgRNA targeting mouse albumin
  misc_feature 1..46: note = Description: mAlb29-8-37
  source 1..46: mol_type = other RNA

SEQ ID NO: 5703 - RNA, 46 nt, synthetic construct
  misc_feature 1..46: note = Category: MG29-1 sgRNA targeting mouse albumin
  misc_feature 1..46: note = Description: mAlb29-12-44
  source 1..46: mol_type = other RNA
cttttaatttctactgttgtagatagtgtagcagagaggaaccatt

SEQ ID NO: 5704 - RNA, 70 nt, synthetic construct
  misc_feature 1..70: note = Category: MG29-1 sgRNA targeting mouse HAO1
  misc_feature 1..70: note = Description: mH29-29-50
  source 1..70: mol_type = other RNA
gttgagaatcgaaagattctcaaccttttaatttctactgttgtagatccttaggagaaaatgccaaatc

SEQ ID NO: 5705 - RNA, 68 nt, synthetic construct
  misc_feature 1..68: note = Category: MG29-1 sgRNA targeting mouse HAO1
  misc_feature 1..68: note = Description: mH29-29-50b
  source 1..68: mol_type = other RNA
gttgagaatcgaaagattctcaaccttttaatttctactgttgtagatccttaggagaaaatgccaaa

SEQ ID NO: 5706 - RNA, 68 nt, synthetic construct; identical to SEQ ID NO: 5705
  misc_feature 1..68: note = Category: MG29-1 sgRNA targeting mouse HAO1
  misc_feature 1..68: note = Description: mH29-29-51b
  source 1..68: mol_type = other RNA

SEQ ID NO: 5707 - RNA, 68 nt, synthetic construct; identical to SEQ ID NO: 5705
  misc_feature 1..68: note = Category: MG29-1 sgRNA targeting mouse HAO1
  misc_feature 1..68: note = Description: mH29-29-52b
  source 1..68: mol_type = other RNA

SEQ ID NO: 5708 - RNA, 68 nt, synthetic construct; identical to SEQ ID NO: 5705
  misc_feature 1..68: note = Category: MG29-1 sgRNA targeting mouse HAO1
  misc_feature 1..68: note = Description: mH29-29-53b
  source 1..68: mol_type = other RNA

SEQ ID NO: 5709 - RNA, 68 nt, synthetic construct; identical to SEQ ID NO: 5705
  misc_feature 1..68: note = Category: MG29-1 sgRNA targeting mouse HAO1
  misc_feature 1..68: note = Description: mH29-29-54b
  source 1..68: mol_type = other RNA

SEQ ID NO: 5710 - RNA, 44 nt, synthetic construct
  misc_feature 1..44: note = Category: MG29-1 sgRNA targeting mouse HAO1
  misc_feature 1..44: note = Description: mH29-29.1_37
  source 1..44: mol_type = other RNA
cttttaatttctactgttgtagatccttaggagaaaatgccaaa

SEQ ID NO: 5711 - RNA, 44 nt, synthetic construct; identical to SEQ ID NO: 5710
  misc_feature 1..44: note = Category: MG29-1 sgRNA targeting mouse HAO1
  misc_feature 1..44: note = Description: mH29-29.2_37
  source 1..44: mol_type = other RNA

SEQ ID NO: 5712 - RNA, 126 nt, synthetic construct
  misc_feature 1..126: note = Category: MG29-1 CRISPR array targeting mouse albumin
  misc_feature 1..126: note = Description: mAlb29-g8-37-array
  source 1..126: mol_type = other RNA
gtctaagaccttacttaatttctactgttgtagatctgtaacgatcgggaactggcatcttcagtctaagaccttacttaatttctactgttgtagatctgtaacgatcgggaactggcatcttca

SEQ ID NO: 5713 - RNA, 44 nt, synthetic construct
  misc_feature 1..44: note = Category: MG29-1 sgRNA targeting human albumin
  misc_feature 1..44: note = Description: hA29-87-37B
  source 1..44: mol_type = other RNA
cttttaatttctactgttgtagatcgcactaaggaaagtgcaaa

SEQ ID NO: 5714 - RNA, 44 nt, synthetic construct
  misc_feature 1..44: note = Category: MG29-1 sgRNA targeting human albumin
  misc_feature 1..44: note = Description: hA29-78-37B
  source 1..44: mol_type = other RNA
cttttaatttctactgttgtagatttttgcgcactaaggaaagt

SEQ ID NO: 5715 - RNA, 44 nt, synthetic construct
  misc_feature 1..44: note = Category: MG29-1 sgRNA targeting human albumin
  misc_feature 1..44: note = Description: hA29-74-37B
  source 1..44: mol_type = other RNA
cttttaatttctactgttgtagataataaagcatagtgcaatgg

SEQ ID NO: 5716 - RNA, 44 nt, synthetic construct
  misc_feature 1..44: note = Category: MG29-1 sgRNA targeting human albumin
  misc_feature 1..44: note = Description: hA29-83-37B
  source 1..44: mol_type = other RNA
cttttaatttctactgttgtagattgagatcaacagcacaggtt

SEQ ID NO: 5717 - RNA, 44 nt, synthetic construct
  misc_feature 1..44: note = Category: MG29-1 sgRNA targeting human albumin
  misc_feature 1..44: note = Description: hA29-84-37B
  source 1..44: mol_type = other RNA
cttttaatttctactgttgtagatcactttccttagtgcgcaaa

SEQ ID NO: 5718 - RNA, 44 nt, synthetic construct
  misc_feature 1..44: note = Category: MG29-1 sgRNA targeting human HAO1
  misc_feature 1..44: note = Description: hH29-4_37b
  source 1..44: mol_type = other RNA
cttttaatttctactgttgtagatccccagacctgtaatagtca

SEQ ID NO: 5719 - RNA, 44 nt, synthetic construct
  misc_feature 1..44: note = Category: MG29-1 sgRNA targeting human HAO1
  misc_feature 1..44: note = Description: hH29-21_37b
  source 1..44: mol_type = other RNA
cttttaatttctactgttgtagatggacagagggtcagcatgcc

SEQ ID NO: 5720 - RNA, 44 nt, synthetic construct
  misc_feature 1..44: note = Category: MG29-1 sgRNA targeting human HAO1
  misc_feature 1..44: note = Description: hH29-23_37b
  source 1..44: mol_type = other RNA
cttttaatttctactgttgtagattcagcctgtcagtccctggg

SEQ ID NO: 5721 - RNA, 44 nt, synthetic construct
  misc_feature 1..44: note = Category: MG29-1 sgRNA targeting human HAO1
  misc_feature 1..44: note = Description: hH29-41_37b
  source 1..44: mol_type = other RNA
cttttaatttctactgttgtagatatatcttcccagctgataga

SEQ ID NO: 5722 - RNA, 70 nt, synthetic construct
  misc_feature 1..70: note = Category: MG29-1 sgRNA targeting human HAO1
  misc_feature 1..70: note = Description: hH29-4_50
  source 1..70: mol_type = other RNA
gttgagaatcgaaagattctcaaccttttaatttctactgttgtagatccccagacctgtaatagtcata

SEQ ID NO: 5723 - RNA, 70 nt, synthetic construct
  misc_feature 1..70: note = Category: MG29-1 sgRNA targeting human HAO1
  misc_feature 1..70: note = Description: hH29-21_50
  source 1..70: mol_type = other RNA
gttgagaatcgaaagattctcaaccttttaatttctactgttgtagatggacagagggtcagcatgccaa

SEQ ID NO: 5724 - RNA, 70 nt, synthetic construct
  misc_feature 1..70: note = Category: MG29-1 sgRNA targeting human HAO1
  misc_feature 1..70: note = Description: hH29-23_50
  source 1..70: mol_type = other RNA
gttgagaatcgaaagattctcaaccttttaatttctactgttgtagattcagcctgtcagtccctgggaa

SEQ ID NO: 5725 - RNA, 70 nt, synthetic construct
  misc_feature 1..70: note = Category: MG29-1 sgRNA targeting human HAO1
  misc_feature 1..70: note = Description: hH29-41_50
  source 1..70: mol_type = other RNA
gttgagaatcgaaagattctcaaccttttaatttctactgttgtagatatatcttcccagctgatagatg

SEQ ID NO: 5726 - RNA, 68 nt, synthetic construct
  misc_feature 1..68: note = Category: MG29-1 sgRNA targeting human HAO1
  misc_feature 1..68: note = Description: hH29-4_50b
  source 1..68: mol_type = other RNA
gttgagaatcgaaagattctcaaccttttaatttctactgttgtagatccccagacctgtaatagtca

SEQ ID NO: 5727 - RNA, 68 nt, synthetic construct
  misc_feature 1..68: note = Category: MG29-1 sgRNA targeting human HAO1
  misc_feature 1..68: note = Description: hH29-21_50b
  source 1..68: mol_type = other RNA
gttgagaatcgaaagattctcaaccttttaatttctactgttgtagatggacagagggtcagcatgcc

SEQ ID NO: 5728 - RNA, 68 nt, synthetic construct
  misc_feature 1..68: note = Category: MG29-1 sgRNA targeting human HAO1
  misc_feature 1..68: note = Description: hH29-23_50b
  source 1..68: mol_type = other RNA
gttgagaatcgaaagattctcaaccttttaatttctactgttgtagattcagcctgtcagtccctggg

SEQ ID NO: 5729 - RNA, 68 nt, synthetic construct
  misc_feature 1..68: note = Category: MG29-1 sgRNA targeting human HAO1
  misc_feature 1..68: note = Description: hH29-41_50b
  source 1..68: mol_type = other RNA
gttgagaatcgaaagattctcaaccttttaatttctactgttgtagatatatcttcccagctgataga

SEQ ID NO: 5730 - RNA, 70 nt, synthetic construct; identical to SEQ ID NO: 5722
  misc_feature 1..70: note = Category: MG29-1 sgRNA targeting mouse HAO1
  misc_feature 1..70: note = Description: mH29-1-50
  source 1..70: mol_type = other RNA

SEQ ID NO: 5731 - RNA, 70 nt, synthetic construct
  misc_feature 1..70: note = Category: MG29-1 sgRNA targeting mouse HAO1
  misc_feature 1..70: note = Description: mH29-15-50
  source 1..70: mol_type = other RNA
gttgagaatcgaaagattctcaaccttttaatttctactgttgtagattgactgtggacaccccttacct

SEQ ID NO: 5732 - RNA, 68 nt, synthetic construct; identical to SEQ ID NO: 5726
  misc_feature 1..68: note = Category: MG29-1 sgRNA targeting mouse HAO1
  misc_feature 1..68: note = Description: mH29-1-50b
  source 1..68: mol_type = other RNA

SEQ ID NO: 5733 - RNA, 68 nt, synthetic construct
  misc_feature 1..68: note = Category: MG29-1 sgRNA targeting mouse HAO1
  misc_feature 1..68: note = Description: mH29-15-50b
  source 1..68: mol_type = other RNA
gttgagaatcgaaagattctcaaccttttaatttctactgttgtagattgactgtggacaccccttac

SEQ ID NO: 5734 - RNA, 100 nt, synthetic construct
  misc_feature 1..100: note = Category: SpCas9 sgRNA targeting mouse albumin
  misc_feature 1..100: note = Description: mAlbR1 guide RNA
  source 1..100: mol_type = other RNA
ttagtatagcatggtcgagcgttttagagctagaaatagcaagttaaaataaggctagtccgttatcaacttgaaaaagtggcaccgagtcggtgctttt

SEQ ID NO: 5735 - RNA, 100 nt, synthetic construct
  misc_feature 1..100: note = Category: SpCas9 sgRNA targeting mouse albumin
  misc_feature 1..100: note = Description: mAlbR2 guide RNA
  source 1..100: mol_type = other RNA
ttcctgtaacgatcgggaacgttttagagctagaaatagcaagttaaaataaggctagtccgttatcaacttgaaaaagtggcaccgagtcggtgctttt

SEQ ID NO: 5736 - RNA, 100 nt, synthetic construct
  misc_feature 1..100: note = Category: SpCas9 sgRNA targeting mouse albumin
  misc_feature 1..100: note = Description: mAlbR3 guide RNA
  source 1..100: mol_type = other RNA
tgccagttcccgatcgttacgttttagagctagaaatagcaagttaaaataaggctagtccgttatcaacttgaaaaagtggcaccgagtcggtgctttt

SEQ ID NO: 5737 - DNA, 18 bp, synthetic construct
  misc_feature 1..18: note = Category: PCR primer
  misc_feature 1..18: note = Description: mAlb90F PCR primer
  source 1..18: mol_type = other DNA
ctcctcttcgtctccggc

SEQ ID NO: 5738 - DNA, 19 bp, synthetic construct
  misc_feature 1..19: note = Category: PCR primer
  misc_feature 1..19: note = Description: mAlb1073R PCR primer
  source 1..19: mol_type = other DNA
ctgccacattgctcagcac

SEQ ID NO: 5739 - DNA, 21 bp, synthetic construct
  misc_feature 1..21: note = Category: PCR primer
  misc_feature 1..21: note = Description: mAlb282F PCR primer
  source 1..21: mol_type = other DNA
ttgcatctgagaacccttagg

SEQ ID NO: 5740 - DNA, 20 bp, synthetic construct
  misc_feature 1..20: note = Category: PCR primer
  misc_feature 1..20: note = Description: mAlb460F PCR primer
  source 1..20: mol_type = other DNA
gcctgctcgaccatgctata

SEQ ID NO: 5741 - RNA, 100 nt, synthetic construct; identical to SEQ ID NO: 5735
  misc_feature 1..100: note = Category: SpCas9 sgRNA targeting mouse albumin
  misc_feature 1..100: note = Description: mAlbR2 guide RNA with extensive chemicalmodifications
  source 1..100: mol_type = other RNA

SEQ ID NO: 5742 - DNA, 4493 bp, synthetic construct
  misc_feature 1..4493: note = Category: SpCas9 DNA sequence
  misc_feature 1..4493: note = Description: Template DNA for spCas9 in vitro transcription
  source 1..4493: mol_type = other DNA
gcggccgctaatacgactcactataagaaaagccagctccagcaggcgctgctcactcctccccatcctctccctctgtccctctgtccctctgaccctgcactgtcccagcaccatggcccccaagaagaagcggaaagttggcggcggaggcagcgacaagaagtactctatcggcctggacatcggcaccaactctgttggatgggccgtgatcaccgacgagtacaaggtgcccagcaagaaattcaaggtgctgggcaacaccgaccggcacagcatcaagaagaatctgatcggcgccctgctgttcgactctggcgaaacagccgaagccaccagactgaagagaaccgccagacggcggtacaccagaagaaagaaccggatctgctacctgcaagagatcttcagcaacgagatggccaaggtggacgacagcttcttccacagactggaagagtccttcctggtggaagaggacaagaagcacgagcggcaccccatcttcggcaacatcgtggatgaggtggcctaccacgagaagtaccccaccatctaccacctgagaaagaaactggtggacagcaccgacaaggccgacctgagactgatctatctggccctggctcacatgatcaagttccggggccacttcctgatcgagggcgacctgaatcctgacaacagcgacgtggacaagctgttcatccagctggtgcagacctacaaccagctgttcgaggaaaaccccatcaacgccagcggagtggatgccaaggccatcctgtctgccagactgagcaagagcagacggctggaaaacctgatcgctcagctgcccggcgagaagaagaatggcctgttcggcaacctgattgccctgagcctgggcctgacacctaacttcaagagcaacttcgacctggccgaggacgccaaactgcagctgtccaaggacacctacgacgacgacctggacaatctgctggcccagatcggcgatcagtacgccgacttgtttctggccgccaagaacctgtccgacgccatcctgctgagcgacatcctgagagtgaacaccgagatcacaaaggcccctctgagcgcctctatgatcaagagatacgacgagcaccaccaggatctgaccctgctgaaggccctcgttagacagcagctgcctgagaagtacaaagagattttcttcgaccagagcaagaacggctacgccggctacattgatggcggagccagccaagaggaattctacaagttcatcaagcccatcctcgagaagatggacggcaccgaggaactgctggtcaagctgaacagagaggacctgctgcggaagcagcggaccttcgacaatggctctatccctcaccagatccacctgggagagctgcacgccattctgcggagacaagaggacttttacccattcctgaaggacaaccgggaaaagattgagaagatcctgaccttcaggatcccctactacgtgggaccactggccagaggcaatagcagattcgcctggatgaccagaaagagcgaggaaaccatcacaccctggaacttcgaggaagtggtggacaagggcgccagcgctcagtccttcatcgagcggatgaccaacttcgataagaacctgcctaacgagaaggtgctgcccaagcacagcctgctgtacgagtacttcaccgtgtacaacgagctgaccaaagtgaaatacgtgaccgagggaatgagaaagcccgcctttctgagcggcgagcagaaaaaggccattgtggatctgctgttcaagaccaaccggaaagtgaccgtgaagcagctgaaagaggactacttcaagaaaatcgagtgcttcgacagcgtggaaatcagcggcgtggaagatcggttcaatgccagcctgggcacataccacgacctgctgaaaattatcaaggacaaggacttcctggacaacgaagagaacgaggacatcctggaagatatcgtgctgaccctgacactgtttgaggacagagagatgatcgaggaacggctgaaaacatacgcccacctgttcgacgacaaagtgatgaagcaactgaagcggcggagatacaccggctggggcagactgtctcggaagctgatcaacggcatccgggataagcagtccggcaagaccatcctggactttctgaagtccgacggcttcgccaacagaaacttcatgcagctgatccacgacgacagcctgacctttaaagaggatatccagaaagcccaggtgtccggccagggcgattctctgcatgagcacattgccaacctggccggctctcccgccattaagaagggcattctgcagacagtgaaggtggtggacgagctggtcaaagtcatgggcagacacaagcccgagaacatcgtgatcgaaatggccagagagaaccagaccacacagaagggccagaagaacagccgcgagagaatgaagcggatcgaagagggcatcaaagagctgggcagccagatcctgaaagaacaccccgtggaaaacacccagctgcagaacgagaagctgtacctgtactacctccagaacggccgggatatgtacgtggaccaagagctggacatcaaccggctgtccgactacgatgtggaccatatcgtgccccagtcttttctgaaggacgactccatcgacaacaaggtcctgaccagatccgacaagaatcggggcaagagcgacaacgtgccctccgaagaggtggtcaagaagatgaagaactactggcgacagctgctgaacgccaagctgattacccagcggaagttcgataacctgaccaaggccgagagaggcggcctgtctgaactggataaggccggcttcatcaagagacagctggtggaaacccggcagatcaccaaacacgtggcacagattctggactcccggatgaacactaagtacgacgagaatgacaagctgatccgggaagtgaaagtgatcaccctgaagtccaagctggtgtccgatttccggaaggatttccagttctacaaagtgcgcgagatcaacaactaccatcacgcccacgacgcctacctgaatgccgttgttggaacagccctgatcaagaagtatcccaagctggaaagcgagttcgtgtacggcgactacaaggtgtacgacgtgcggaagatgatcgccaagagcgagcaagagattggcaaggctaccgccaagtactttttctacagcaacatcatgaactttttcaagaccgagattaccctggccaacggcgagatcagaaagcggcctctgatcgagacaaacggcgaaaccggcgagattgtgtgggataagggcagagactttgccacagtgcggaaagtgctgagcatgccccaagtgaatatcgtgaagaaaaccgaggtgcagacaggcggcttcagcaaagagtccattctgcccaagagaaacagcgataagctgatcgcccggaagaaggactgggaccctaagaagtacggcggcttcgatagccctaccgtggcctattctgtgctggtggtggccaaagtggaaaagggcaagtccaagaaactcaagagcgtgaaagagctgctggggatcaccatcatggaaagaagcagcttcgagaagaatcctatcgatttcctcgaggccaagggctacaaagaagtgaaaaaggacctgatcatcaagctccccaagtactccctgttcgagctggaaaatggccggaagcggatgctggcttctgctggcgaactgcagaagggaaacgaactggccctgcctagcaaatatgtgaacttcctgtacctggccagccactatgagaagctgaagggcagccccgaggacaatgagcaaaagcagctgtttgtggaacagcacaagcactacctggacgagatcatcgagcagatcagcgagttctccaagagagtgatcctggccgacgctaatctggacaaagtgctgtccgcctacaacaagcaccgggacaagcctatcagagagcaggccgagaatatcatccacctgtttaccctgaccaatctgggagcccctgccgccttcaagtacttcgacaccaccatcgaccggaagcgctacaccagcaccaaagaggtgctggacgccacactgatccaccagtctatcaccggcctgtacgagacacggatcgacctgtctcagctcggaggcgattctggcggaaaaagacctgccgccacaaagaaagccggacaggccaagaaaaagaagtgaccacacccccattcccccactccagataaagcttcagttatatctcacgtgtctggagttaaaaaaaaaaaaaaaaaaaaaaaaaaaaaaaaaaaaaaaaaaaaaaaaaaaaaaaaaaaaaaaaaaaaaaaaaaaaaaaaaaaaaaaaaaaaaaaaaaaagaagagccctgcagg

SEQ ID NO: 5743 - protein, 1400 aa, synthetic construct
  REGION 1..1400: note = Category: SpCas9 protein sequence
  REGION 1..1400: note = Description: Amino acid sequence of spCas9 encoded in mRNAinclusing nuclear localization signals
MAPKKKRKVGGGGSDKKYSIGLDIGTNSVGWAVITDEYKVPSKKFKVLGNTDRHSIKKNLIGALLFDSGETAEATRLKRTARRRYTRRKNRICYLQEIFSNEMAKVDDSFFHRLEESFLVEEDKKHERHPIFGNIVDEVAYHEKYPTIYHLRKKLVDSTDKADLRLIYLALAHMIKFRGHFLIEGDLNPDNSDVDKLFIQLVQTYNQLFEENPINASGVDAKAILSARLSKSRRLENLIAQLPGEKKNGLFGNLIALSLGLTPNFKSNFDLAEDAKLQLSKDTYDDDLDNLLAQIGDQYADLFLAAKNLSDAILLSDILRVNTEITKAPLSASMIKRYDEHHQDLTLLKALVRQQLPEKYKEIFFDQSKNGYAGYIDGGASQEEFYKFIKPILEKMDGTEELLVKLNREDLLRKQRTFDNGSIPHQIHLGELHAILRRQEDFYPFLKDNREKIEKILTFRIPYYVGPLARGNSRFAWMTRKSEETITPWNFEEVVDKGASAQSFIERMTNFDKNLPNEKVLPKHSLLYEYFTVYNELTKVKYVTEGMRKPAFLSGEQKKAIVDLLFKTNRKVTVKQLKEDYFKKIECFDSVEISGVEDRFNASLGTYHDLLKIIKDKDFLDNEENEDILEDIVLTLTLFEDREMIEERLKTYAHLFDDKVMKQLKRRRYTGWGRLSRKLINGIRDKQSGKTILDFLKSDGFANRNFMQLIHDDSLTFKEDIQKAQVSGQGDSLHEHIANLAGSPAIKKGILQTVKVVDELVKVMGRHKPENIVIEMARENQTTQKGQKNSRERMKRIEEGIKELGSQILKEHPVENTQLQNEKLYLYYLQNGRDMYVDQELDINRLSDYDVDHIVPQSFLKDDSIDNKVLTRSDKNRGKSDNVPSEEVVKKMKNYWRQLLNAKLITQRKFDNLTKAERGGLSELDKAGFIKRQLVETRQITKHVAQILDSRMNTKYDENDKLIREVKVITLKSKLVSDFRKDFQFYKVREINNYHHAHDAYLNAVVGTALIKKYPKLESEFVYGDYKVYDVRKMIAKSEQEIGKATAKYFFYSNIMNFFKTEITLANGEIRKRPLIETNGETGEIVWDKGRDFATVRKVLSMPQVNIVKKTEVQTGGFSKESILPKRNSDKLIARKKDWDPKKYGGFDSPTVAYSVLVVAKVEKGKSKKLKSVKELLGITIMERSSFEKNPIDFLEAKGYKEVKKDLIIKLPKYSLFELENGRKRMLASAGELQKGNELALPSKYVNFLYLASHYEKLKGSPEDNEQKQLFVEQHKHYLDEIIEQISEFSKRVILADANLDKVLSAYNKHRDKPIREQAENIIHLFTLTNLGAPAAFKYFDTTIDRKRYTSTKEVLDATLIHQSITGLYETRIDLSQLGGDSGGKRPAATKKAGQAKKKK

SEQ ID NO: 5744 - RNA, 70 nt, synthetic construct; identical to SEQ ID NO: 5689
  misc_feature 1..70: note = Category: MG29-1 sgRNA targeting mouse albumin
  misc_feature 1..70: note = Description: mAlb29-8-50 guide RNA
  source 1..70: mol_type = other RNA

SEQ ID NO: 5745 - RNA, 46 nt, synthetic construct; identical to SEQ ID NO: 4299
  misc_feature 1..46: note = Category: Guide RNA
  misc_feature 1..46: note = Description: mAlb298-40
  source 1..46: mol_type = other RNA

SEQ ID NO: 5746 - DNA, 46 bp, synthetic construct; identical to SEQ ID NO: 4313
  source 1..46: mol_type = other DNA
  modified_base 1: mod_base = cm
  modified_base 2: mod_base = um
  modified_base 3: mod_base = um
  modified_base 10: mod_base = um
  modified_base 11: mod_base = cm
  modified_base 12: mod_base = um
  modified_base 46: mod_base = OTHER; note = 2'-O-methyladenosine
  modified_base 44..45: mod_base = OTHER; note = Phosphorothioate linkage
  modified_base 45..46: mod_base = OTHER; note = Phosphorothioate linkage
  modified_base 4..5: mod_base = OTHER; note = Phosphorothioate linkage
  modified_base 15..16: mod_base = OTHER; note = Phosphorothioate linkage
  modified_base 2..3: mod_base = OTHER; note = Phosphorothioate linkage
  modified_base 3..4: mod_base = OTHER; note = Phosphorothioate linkage
  modified_base 17..18: mod_base = OTHER; note = Phosphorothioate linkage
  modified_base 1..2: mod_base = OTHER; note = Phosphorothioate linkage
  modified_base 18..19: mod_base = OTHER; note = Phosphorothioate linkage
  modified_base 41..42: mod_base = OTHER; note = Phosphorothioate linkage
  misc_feature 1..18: note = RNA
  modified_base 13: mod_base = OTHER; note = 2'-O-methyladenosine
  modified_base 16..17: mod_base = OTHER; note = Phosphorothioate linkage
  modified_base 42..43: mod_base = OTHER; note = Phosphorothioate linkage
  misc_feature 19..24: note = DNA
  misc_feature 25..46: note = RNA
  modified_base 25..45: mod_base = OTHER; note = 2'-fluoronucleosides

SEQ ID NO: 5747 - RNA, 46 nt, synthetic construct; identical to SEQ ID NO: 4299
  misc_feature 1..46: note = Category: Guide RNA
  misc_feature 1..46: note = Description: mAlb298-42
  source 1..46: mol_type = other RNA

SEQ ID NO: 5748 - RNA, 46 nt, synthetic construct; identical to SEQ ID NO: 4299
  misc_feature 1..46: note = Category: Guide RNA
  misc_feature 1..46: note = Description: mAlb298-43
  source 1..46: mol_type = other RNA

SEQ ID NO: 5749 - RNA, 46 nt, synthetic construct; identical to SEQ ID NO: 4299
  misc_feature 1..46: note = Category: Guide RNA
  misc_feature 1..46: note = Description: mAlb298-44
  source 1..46: mol_type = other RNA

SEQ ID NO: 5750 - RNA, 46 nt, synthetic construct; identical to SEQ ID NO: 4299
  misc_feature 1..46: note = Category: Guide RNA
  misc_feature 1..46: note = Description: mAlb298-37
  source 1..46: mol_type = other RNA

SEQ ID NO: 5751 - RNA, 70 nt, synthetic construct; identical to SEQ ID NO: 5689
  misc_feature 1..70: note = Category: Guide RNA
  misc_feature 1..70: note = Description: mAlb29-8-50
  source 1..70: mol_type = other RNA

SEQ ID NO: 5752 - RNA, 70 nt, synthetic construct; identical to SEQ ID NO: 5689
  misc_feature 1..70: note = Category: Guide RNA
  misc_feature 1..70: note = Description: mAlb29-8-49
  source 1..70: mol_type = other RNA

SEQ ID NO: 5753 - RNA, 88 nt, synthetic construct
  misc_feature 1..88: note = Category: Guide RNA
  misc_feature 1..88: note = Description: mAlb29-8-48
  source 1..88: mol_type = other RNA
gttgagaatcgaaagattcttaataaggcatccttccgatgccttttaatttctactgttgtagatctgtaacgatcgggaactggca

SEQ ID NO: 5754 - RNA, 88 nt, synthetic construct; identical to SEQ ID NO: 5753
  misc_feature 1..88: note = Category: Guide RNA
  misc_feature 1..88: note = Description: mAlb29-8-47
  source 1..88: mol_type = other RNA

SEQ ID NO: 5755 - RNA, 88 nt, synthetic construct; identical to SEQ ID NO: 5753
  misc_feature 1..88: note = Category: Guide RNA
  misc_feature 1..88: note = Description: mAlb29-8-46
  source 1..88: mol_type = other RNA

SEQ ID NO: 5756 - RNA, 46 nt, synthetic construct; identical to SEQ ID NO: 4299
  misc_feature 1..46: note = Category: Guide RNA
  misc_feature 1..46: note = Description: mAlb298-37
  source 1..46: mol_type = other RNA

SEQ ID NO: 5757 - RNA, 46 nt, synthetic construct; identical to SEQ ID NO: 5703
  misc_feature 1..46: note = Category: Guide RNA
  misc_feature 1..46: note = Description: mAlb2912-37
  source 1..46: mol_type = other RNA

SEQ ID NO: 5758 - RNA, 46 nt, synthetic construct
  misc_feature 1..46: note = Category: Guide RNA
  misc_feature 1..46: note = Description: mAlb2918-37
  source 1..46: mol_type = other RNA
cttttaatttctactgttgtagataagattgatgaagacaactaac

SEQ ID NO: 5759 - RNA, 44 nt, synthetic construct; identical to SEQ ID NO: 4272
  misc_feature 1..44: note = Category: Guide RNA
  misc_feature 1..44: note = Description: mAlb298-34
  source 1..44: mol_type = other RNA

SEQ ID NO: 5760 - DNA, 18 bp, synthetic construct
  misc_feature 1..18: note = Category: Primer
  misc_feature 1..18: note = Description: mAlb90F
  source 1..18: mol_type = other DNA
ctcctcttcgtctccggc

SEQ ID NO: 5761 - DNA, 19 bp, synthetic construct
  misc_feature 1..19: note = Category: Primer
  misc_feature 1..19: note = Description: mAlb1073
  source 1..19: mol_type = other DNA
ctgccacattgctcagcac

SEQ ID NO: 5762 - DNA, 20 bp, synthetic construct
  misc_feature 1..20: note = Category: Primer
  misc_feature 1..20: note = Description: mALb460F
  source 1..20: mol_type = other DNA
gcctgctcgaccatgctata

SEQ ID NO: 5763 - DNA, 22 bp, synthetic construct
  misc_feature 1..22: note = Category: Guide RNA
  misc_feature 1..22: note = Description: mH29-1
  source 1..22: mol_type = other DNA
ccccagacctgtaatagtcata

SEQ ID NO: 5764 - DNA, 22 bp, synthetic construct
  misc_feature 1..22: note = Category: Guide RNA
  misc_feature 1..22: note = Description: mH29-15
  source 1..22: mol_type = other DNA
tgactgtggacaccccttacct

SEQ ID NO: 5765 - DNA, 22 bp, synthetic construct
  misc_feature 1..22: note = Category: Guide RNA
  misc_feature 1..22: note = Description: mH29-16
  source 1..22: mol_type = other DNA
attacagcctgtcagaccatgg

SEQ ID NO: 5766 - DNA, 22 bp, synthetic construct
  misc_feature 1..22: note = Category: Guide RNA
  misc_feature 1..22: note = Description: mH29-26
  source 1..22: mol_type = other DNA
tccatttcattacagcctgtca

SEQ ID NO: 5767 - DNA, 22 bp, synthetic construct
  misc_feature 1..22: note = Category: Guide RNA
  misc_feature 1..22: note = Description: mH29-29
  source 1..22: mol_type = other DNA
ccttaggagaaaatgccaaatc

SEQ ID NO: 5768 - DNA, 20 bp, synthetic construct
  misc_feature 1..20: note = Category: Primer
  misc_feature 1..20: note = Description: PCR_mHE1_F_+233
  source 1..20: mol_type = other DNA
gtgaccaaccctacccgttt

SEQ ID NO: 5769 - DNA, 20 bp, synthetic construct
  misc_feature 1..20: note = Category: Primer
  misc_feature 1..20: note = Description: PCR_mHE1_R_-553
  source 1..20: mol_type = other DNA
gcaagcacctactgtctcgt

SEQ ID NO: 5770 - DNA, 24 bp, synthetic construct
  misc_feature 1..24: note = Category: Primer
  misc_feature 1..24: note = Description: Seq_mHE1_F_+139
  source 1..24: mol_type = other DNA
gtctaggcatacaatgtttgctca

SEQ ID NO: 5771 - DNA, 20 bp, synthetic construct
  misc_feature 1..20: note = Category: Primer
  misc_feature 1..20: note = Description: HAO1_E2_F5721
  source 1..20: mol_type = other DNA
caacgaaggttccctccagg

SEQ ID NO: 5772 - DNA, 20 bp, synthetic construct
  misc_feature 1..20: note = Category: Primer
  misc_feature 1..20: note = Description: HAO1_E2_R6271
  source 1..20: mol_type = other DNA
ggaagggtgttcgagaagga

SEQ ID NO: 5773 - DNA, 23 bp, synthetic construct
  misc_feature 1..23: note = Category: Primer
  misc_feature 1..23: note = Description: 5938F Seq_HAO1_E2
  source 1..23: mol_type = other DNA
ctatgcaaggaaaagatttggcc

SEQ ID NO: 5774 - DNA, 20 bp, synthetic construct
  misc_feature 1..20: note = Category: Primer
  misc_feature 1..20: note = Description: HAO1_E3_F23198
  source 1..20: mol_type = other DNA
tgccctagacaagctgacac

SEQ ID NO: 5775 - DNA, 20 bp, synthetic construct
  misc_feature 1..20: note = Category: Primer
  misc_feature 1..20: note = Description: HAO1_E3_R23879
  source 1..20: mol_type = other DNA
cagattctggaagtggccca

SEQ ID NO: 5776 - DNA, 21 bp, synthetic construct
  misc_feature 1..21: note = Category: Primer
  misc_feature 1..21: note = Description: PCR_mHE4_F_+300
  source 1..21: mol_type = other DNA
ggctggctgaaaatagcatcc

SEQ ID NO: 5777 - DNA, 20 bp, synthetic construct
  misc_feature 1..20: note = Category: Primer
  misc_feature 1..20: note = Description: HAO1_E4_R31650
  source 1..20: mol_type = other DNA
aggtttggttcccctcacct

SEQ ID NO: 5778 - DNA, 22 bp, synthetic construct
  misc_feature 1..22: note = Category: Primer
  misc_feature 1..22: note = Description: PCR_mHE4_R_-149
  source 1..22: mol_type = other DNA
tctgccatgaaggcatatggac

SEQ ID NO: 5779 - RNA, 46 nt, synthetic construct
  misc_feature 1..46: note = Category: Guide RNA
  misc_feature 1..46: note = Description: mH29-1_37
  source 1..46: mol_type = other RNA
cttttaatttctactgttgtagatccccagacctgtaatagtcata

SEQ ID NO: 5780 - RNA, 46 nt, synthetic construct
  misc_feature 1..46: note = Category: Guide RNA
  misc_feature 1..46: note = Description: mH29-15_37
  source 1..46: mol_type = other RNA
cttttaatttctactgttgtagattgactgtggacaccccttacct

SEQ ID NO: 5781 - RNA, 46 nt, synthetic construct
  misc_feature 1..46: note = Category: Guide RNA
  misc_feature 1..46: note = Description: mH29-29_37
  source 1..46: mol_type = other RNA
cttttaatttctactgttgtagatccttaggagaaaatgccaaatc

SEQ ID NO: 5782 - DNA, 40 bp, synthetic construct
  misc_feature 1..40: note = Category: Primer
  misc_feature 1..40: note = Description: mAlb298_NGS_F
  misc_difference 14..18: note = any nucleotide
  source 1..40: mol_type = other DNA
gctcttccgatctnnnnncttgagtttgaatgcacagata

SEQ ID NO: 5783 - DNA, 40 bp, synthetic construct
  misc_feature 1..40: note = Category: Primer
  misc_feature 1..40: note = Description: mAlb298_NGS_R
  misc_difference 14..18: note = any nucleotide
  source 1..40: mol_type = other DNA
gctcttccgatctnnnnntggaaacagggagagaaaaacc

SEQ ID NO: 5784 - DNA, 41 bp, synthetic construct
  misc_feature 1..41: note = Category: Primer
  misc_feature 1..41: note = Description: mAlb2912_NGS_F
  misc_difference 14..18: note = any nucleotide
  source 1..41: mol_type = other DNA
gctcttccgatctnnnnntacaaacatgacagaaacactaa

SEQ ID NO: 5785 - DNA, 41 bp, synthetic construct
  misc_feature 1..41: note = Category: Primer
  misc_feature 1..41: note = Description: mAlb2912_NGS_R
  misc_difference 14..18: note = any nucleotide
  source 1..41: mol_type = other DNA
gctcttccgatctnnnnngattgatgaagacaactaactgt

SEQ ID NO: 5786 - DNA, 38 bp, synthetic construct
  misc_feature 1..38: note = Category: Primer
  misc_feature 1..38: note = Description: mAlb2918_NGS_F
  source 1..38: mol_type = other DNA
  misc_difference 14..18: note = any nucleotide
gctcttccgatctnnnnnctttgagtgtagcagagagg

SEQ ID NO: 5787 - DNA, 38 bp, synthetic construct
  misc_feature 1..38: note = Category: Primer
  misc_feature 1..38: note = Description: mAlb2918_NGS_R
  source 1..38: mol_type = other DNA
  misc_difference 14..18: note = any nucleotide
gctcttccgatctnnnnncattataccgatgggcgatc

SEQ ID NO: 5788 - RNA, 42 nt, synthetic construct
  misc_feature 1..42: note = Category: MG29-1 sgRNA targeting human HAO-1
  misc_feature 1..42: note = Description: hH29-1
  source 1..42: mol_type = other RNA
taatttctactgttgtagatgcatgttgttcataatcattga

SEQ ID NO: 5789 - RNA, 42 nt, synthetic construct
  misc_feature 1..42: note = Category: MG29-1 sgRNA targeting human HAO-1
  misc_feature 1..42: note = Description: hH29-2
  source 1..42: mol_type = other RNA
taatttctactgttgtagatgaagtactgatttagcatgttg

SEQ ID NO: 5790 - RNA, 42 nt, synthetic construct
  misc_feature 1..42: note = Category: MG29-1 sgRNA targeting human HAO-1
  misc_feature 1..42: note = Description: hH29-3
  source 1..42: mol_type = other RNA
taatttctactgttgtagattatcaatgattatgaacaacat

SEQ ID NO: 5791 - RNA, 42 nt, synthetic construct
  misc_feature 1..42: note = Category: MG29-1 sgRNA targeting human HAO-1
  misc_feature 1..42: note = Description: hH29-4
  source 1..42: mol_type = other RNA
taatttctactgttgtagatccccagacctgtaatagtcata

SEQ ID NO: 5792 - RNA, 42 nt, synthetic construct
  misc_feature 1..42: note = Category: MG29-1 sgRNA targeting human HAO-1
  misc_feature 1..42: note = Description: hH29-5
  source 1..42: mol_type = other RNA
taatttctactgttgtagatttcatcatttgccccagacctg

SEQ ID NO: 5793 - RNA, 42 nt, synthetic construct
  misc_feature 1..42: note = Category: MG29-1 sgRNA targeting human HAO-1
  misc_feature 1..42: note = Description: hH29-6
  source 1..42: mol_type = other RNA
taatttctactgttgtagatttacctggaaaatgctgcaata

SEQ ID NO: 5794 - RNA, 42 nt, synthetic construct
  misc_feature 1..42: note = Category: MG29-1 sgRNA targeting human HAO-1
  misc_feature 1..42: note = Description: hH29-7
  source 1..42: mol_type = other RNA
taatttctactgttgtagatcttacctggaaaatgctgcaat

SEQ ID NO: 5795 - RNA, 42 nt, synthetic construct
  misc_feature 1..42: note = Category: MG29-1 sgRNA targeting human HAO-1
  misc_feature 1..42: note = Description: hH29-8
  source 1..42: mol_type = other RNA
taatttctactgttgtagatgctgataatattgcagcatttt

SEQ ID NO: 5796 - RNA, 42 nt, synthetic construct
  misc_feature 1..42: note = Category: MG29-1 sgRNA targeting human HAO-1
  misc_feature 1..42: note = Description: hH29-9
  source 1..42: mol_type = other RNA
taatttctactgttgtagataaaaataaattttcttacctgg

SEQ ID NO: 5797 - RNA, 42 nt, synthetic construct
  misc_feature 1..42: note = Category: MG29-1 sgRNA targeting human HAO-1
  misc_feature 1..42: note = Description: hH29-10
  source 1..42: mol_type = other RNA
taatttctactgttgtagataaaaaataaattttcttacctg

SEQ ID NO: 5798 - RNA, 42 nt, synthetic construct
  misc_feature 1..42: note = Category: MG29-1 sgRNA targeting human HAO-1
  misc_feature 1..42: note = Description: hH29-11
  source 1..42: mol_type = other RNA
taatttctactgttgtagatattttattttttaattctagat

SEQ ID NO: 5799 - RNA, 42 nt, synthetic construct
  misc_feature 1..42: note = Category: MG29-1 sgRNA targeting human HAO-1
  misc_feature 1..42: note = Description: hH29-12
  source 1..42: mol_type = other RNA
taatttctactgttgtagatttttattttttaattctagatg

SEQ ID NO: 5800 - RNA, 42 nt, synthetic construct
  misc_feature 1..42: note = Category: MG29-1 sgRNA targeting human HAO-1
  misc_feature 1..42: note = Description: hH29-13
  source 1..42: mol_type = other RNA
taatttctactgttgtagatattttttaattctagatggaag

SEQ ID NO: 5801 - RNA, 42 nt, synthetic construct
  misc_feature 1..42: note = Category: MG29-1 sgRNA targeting human HAO-1
  misc_feature 1..42: note = Description: hH29-14
  source 1..42: mol_type = other RNA
taatttctactgttgtagatttttttaattctagatggaagc

SEQ ID NO: 5802 - RNA, 42 nt, synthetic construct
  misc_feature 1..42: note = Category: MG29-1 sgRNA targeting human HAO-1
  misc_feature 1..42: note = Description: hH29-15
  source 1..42: mol_type = other RNA
taatttctactgttgtagatttaattctagatggaagctgta

SEQ ID NO: 5803 - RNA, 42 nt, synthetic construct
  misc_feature 1..42: note = Category: MG29-1 sgRNA targeting human HAO-1
  misc_feature 1..42: note = Description: hH29-16
  source 1..42: mol_type = other RNA
taatttctactgttgtagattaattctagatggaagctgtat

SEQ ID NO: 5804 - RNA, 42 nt, synthetic construct
  misc_feature 1..42: note = Category: MG29-1 sgRNA targeting human HAO-1
  misc_feature 1..42: note = Description: hH29-17
  source 1..42: mol_type = other RNA
taatttctactgttgtagataattctagatggaagctgtatc

SEQ ID NO: 5805 - RNA, 42 nt, synthetic construct
  misc_feature 1..42: note = Category: MG29-1 sgRNA targeting human HAO-1
  misc_feature 1..42: note = Description: hH29-18
  source 1..42: mol_type = other RNA
taatttctactgttgtagatattctagatggaagctgtatcc

SEQ ID NO: 5806 - RNA, 42 nt, synthetic construct
  misc_feature 1..42: note = Category: MG29-1 sgRNA targeting human HAO-1
  misc_feature 1..42: note = Description: hH29-19
  source 1..42: mol_type = other RNA
taatttctactgttgtagatagcaacattccggagcatcctt

SEQ ID NO: 5807 - RNA, 42 nt, synthetic construct
  misc_feature 1..42: note = Category: MG29-1 sgRNA targeting human HAO-1
  misc_feature 1..42: note = Description: hH29-20
  source 1..42: mol_type = other RNA
taatttctactgttgtagataggacagagggtcagcatgcca

SEQ ID NO: 5808 - RNA, 42 nt, synthetic construct
  misc_feature 1..42: note = Category: MG29-1 sgRNA targeting human HAO-1
  misc_feature 1..42: note = Description: hH29-21
  source 1..42: mol_type = other RNA
taatttctactgttgtagatggacagagggtcagcatgccaa

SEQ ID NO: 5809 - RNA, 42 nt, synthetic construct
  misc_feature 1..42: note = Category: MG29-1 sgRNA targeting human HAO-1
  misc_feature 1..42: note = Description: hH29-22
  source 1..42: mol_type = other RNA
taatttctactgttgtagattttctcagcctgtcagtccctg

SEQ ID NO: 5810 - RNA, 42 nt, synthetic construct
  misc_feature 1..42: note = Category: MG29-1 sgRNA targeting human HAO-1
  misc_feature 1..42: note = Description: hH29-23
  source 1..42: mol_type = other RNA
taatttctactgttgtagattcagcctgtcagtccctgggaa

SEQ ID NO: 5811 - RNA, 42 nt, synthetic construct
  misc_feature 1..42: note = Category: MG29-1 sgRNA targeting human HAO-1
  misc_feature 1..42: note = Description: hH29-24
  source 1..42: mol_type = other RNA
taatttctactgttgtagattgacagtggacacaccttacct

SEQ ID NO: 5812 - RNA, 42 nt, synthetic construct
  misc_feature 1..42: note = Category: MG29-1 sgRNA targeting human HAO-1
  misc_feature 1..42: note = Description: hH29-25
  source 1..42: mol_type = other RNA
taatttctactgttgtagataatctgttacgcacatcatcca

SEQ ID NO: 5813 - RNA, 42 nt, synthetic construct
  misc_feature 1..42: note = Category: MG29-1 sgRNA targeting human HAO-1
  misc_feature 1..42: note = Description: hH29-26
  source 1..42: mol_type = other RNA
taatttctactgttgtagatatgcatttcttattttaggatg

SEQ ID NO: 5814 - RNA, 42 nt, synthetic construct
  misc_feature 1..42: note = Category: MG29-1 sgRNA targeting human HAO-1
  misc_feature 1..42: note = Description: hH29-27
  source 1..42: mol_type = other RNA
taatttctactgttgtagattgcatttcttattttaggatga

SEQ ID NO: 5815 - RNA, 42 nt, synthetic construct
  misc_feature 1..42: note = Category: MG29-1 sgRNA targeting human HAO-1
  misc_feature 1..42: note = Description: hH29-28
  source 1..42: mol_type = other RNA
taatttctactgttgtagatttattttaggatgaaaaatttt

SEQ ID NO: 5816 - RNA, 42 nt, synthetic construct
  misc_feature 1..42: note = Category: MG29-1 sgRNA targeting human HAO-1
  misc_feature 1..42: note = Description: hH29-29
  source 1..42: mol_type = other RNA
taatttctactgttgtagataggatgaaaaattttgaaacca

SEQ ID NO: 5817 - RNA, 42 nt, synthetic construct
  misc_feature 1..42: note = Category: MG29-1 sgRNA targeting human HAO-1
  misc_feature 1..42: note = Description: hH29-30
  source 1..42: mol_type = other RNA
taatttctactgttgtagatggatgaaaaattttgaaaccag

SEQ ID NO: 5818 - RNA, 42 nt, synthetic construct
  misc_feature 1..42: note = Category: MG29-1 sgRNA targeting human HAO-1
  misc_feature 1..42: note = Description: hH29-31
  source 1..42: mol_type = other RNA
taatttctactgttgtagatctcaggagaaaatgataaagta

SEQ ID NO: 5819 - RNA, 42 nt, synthetic construct
  misc_feature 1..42: note = Category: MG29-1 sgRNA targeting human HAO-1
  misc_feature 1..42: note = Description: hH29-32
  source 1..42: mol_type = other RNA
taatttctactgttgtagatcctcaggagaaaatgataaagt

SEQ ID NO: 5820 - RNA, 42 nt, synthetic construct
  misc_feature 1..42: note = Category: MG29-1 sgRNA targeting human HAO-1
  misc_feature 1..42: note = Description: hH29-33
  source 1..42: mol_type = other RNA
taatttctactgttgtagatgaaaccagtactttatcatttt

SEQ ID NO: 5821 - RNA, 42 nt, synthetic construct
  misc_feature 1..42: note = Category: MG29-1 sgRNA targeting human HAO-1
  misc_feature 1..42: note = Description: hH29-34
  source 1..42: mol_type = other RNA
taatttctactgttgtagataaaccagtactttatcattttc

SEQ ID NO: 5822 - RNA, 42 nt, synthetic construct
  misc_feature 1..42: note = Category: MG29-1 sgRNA targeting human HAO-1
  misc_feature 1..42: note = Description: hH29-35
  source 1..42: mol_type = other RNA
taatttctactgttgtagattcattttctcctgaggaaaatt

SEQ ID NO: 5823 - RNA, 42 nt, synthetic construct
  misc_feature 1..42: note = Category: MG29-1 sgRNA targeting human HAO-1
  misc_feature 1..42: note = Description: hH29-36
  source 1..42: mol_type = other RNA
taatttctactgttgtagatctcctgaggaaaattttggaga

SEQ ID NO: 5824 - RNA, 42 nt, synthetic construct
  misc_feature 1..42: note = Category: MG29-1 sgRNA targeting human HAO-1
  misc_feature 1..42: note = Description: hH29-37
  source 1..42: mol_type = other RNA
taatttctactgttgtagattcctgaggaaaattttggagac

SEQ ID NO: 5825 - RNA, 42 nt, synthetic construct
  misc_feature 1..42: note = Category: MG29-1 sgRNA targeting human HAO-1
  misc_feature 1..42: note = Description: hH29-38
  source 1..42: mol_type = other RNA
taatttctactgttgtagatgccacatatgcagcaagtccac

SEQ ID NO: 5826 - RNA, 42 nt, synthetic construct
  misc_feature 1..42: note = Category: MG29-1 sgRNA targeting human HAO-1
  misc_feature 1..42: note = Description: hH29-39
  source 1..42: mol_type = other RNA
taatttctactgttgtagatggagacgacagtggacttgctg

SEQ ID NO: 5827 - RNA, 42 nt, synthetic construct
  misc_feature 1..42: note = Category: MG29-1 sgRNA targeting human HAO-1
  misc_feature 1..42: note = Description: hH29-40
  source 1..42: mol_type = other RNA
taatttctactgttgtagatgagacgacagtggacttgctgc

SEQ ID NO: 5828 - RNA, 42 nt, synthetic construct
  misc_feature 1..42: note = Category: MG29-1 sgRNA targeting human HAO-1
  misc_feature 1..42: note = Description: hH29-41
  source 1..42: mol_type = other RNA
taatttctactgttgtagatatatcttcccagctgatagatg

SEQ ID NO: 5829 - RNA, 42 nt, synthetic construct
  misc_feature 1..42: note = Category: MG29-1 sgRNA targeting human HAO-1
  misc_feature 1..42: note = Description: hH29-42
  source 1..42: mol_type = other RNA
taatttctactgttgtagatcaacaattggcaatgatgtcag

SEQ ID NO: 5830 - DNA, 4087 bp, synthetic construct
  misc_feature 1..4087: note = Category: DNA sequence encoding the MG29-1 messenger RNA
  misc_feature 1..4087: note = Description: DNA sequence encoding the MG29-1 messenger RNA
  source 1..4087: mol_type = other DNA
aaaagccagctccagcaggcgctgctcactcctccccatcctctccctctgtccctctgtccctctgaccctgcactgtcccagcaccatggcccctaagaagaagagaaaagtcggcggaggcggcagcttcaacaacttcatcaagaagtacagcctgcagaaaaccctgcgcttcgagctgaagcctgtgggcgagacagccgactacatcgaggacttcaagagcgagtacctgaaggacaccgtgctgaaggacgagcagagagccaaggactaccaagagatcaagaccctgatcgacgattaccaccgcgagtacatcgaagagtgcctgagagaacccgtggacaagaaaaccggcgagatcctggacttcacccaggacctggaagatgccttcagctactaccagaagctgaaagagaaccccaccgagaacagagtcggctgggagaaagagcaagagagcctgaggaagaagctggtcacctccttcgtgggcaacgacggcctgttcaagaaagagttcatcaccagggacctgcctgagtggctgcagaagaaaggactctggggcgagtacaaggacacagtggaaaacttcaagaagttcaccacctacttcagcggcttccacgagaaccggaagaacatgtacaccgccgaggctcagagcaccgctatcgccaacagactgatgaacgacaacctgcctaagttctttaacaactacctggcctaccagaccatcaaagagaagcaccccgacctggtgttcagactggatgatgctctgctgcaggccgctggcgtggaacatctggatgaggctttccagcctagatacttcagcagactgttcgcccagagcggcatcaccgctttcaacgagctgatcggcggcagaaccacagagaacggcgagaagatccagggcctgaacgagcagatcaacctgtacagacagcagaaccccgagaaggccaagggcttccccagattcatgcctctgttcaagcagatcctgagcgacagagagacacacagctttctgcccgacgccttcgagaacgacaaagagctgctccaggctctgagagactacgtggacgccgccacatctgaggaaggcatgatcagccagctgaacaaggccatgaaccagttcgtgaccgccgacctgaagagagtgtacatcaagagcgccgctctgaccagcctgagccaagagctgttccacttcttcggcgtgatcagcgacgctatcgcttggtacgccgagaagagactgagccccaagaaggcccaagagtctttcctgaagcaagaggtgtacgccatcgaggaactgaaccaggctgtcgtgggctacatcgaccagctggaagatcagagcgagctgcagcaactgctggtggacctgccagatcctcagaaacccgtgtccagcttcatcctgacacactggcagaagtctcaagagcccctgcaggcagtgatcgccaaggtggaacctctgttcgaactggaagaactgagcaagaacaagagggccccaaagcacgacaaggaccaaggcggcgagggatttcagcaggtcgacgccatcaagaacatgctggacgccttcatggaagtgtcccacgctatcaagcccctgtacctggtcaagggaagaaaggccatcgacatgcccgacgtggacaccggcttctacgctgatttcgccgaggcctacagcgcctacgagcaagtgacagtgtccctgtacaacaagaccagaaaccacctgtccaagaagcccttcagcaaggacaagatcaagatcaacttcgacgcccctacactgctgaacggctgggacctgaacaaagagagcgacaacaagtccatcatcctgcggaaggacggcaacttctacctggcaatcatgcaccccaagcacaccaaggtgttcgactgctactctgcctctgaggctgccggcaagtgctacgagaagatgaactacaagctgctgagcggcgccaacaagatgctgcctaaggtgttctttagcaagaagggcatcgagacattcagccctccacaagaaatcctggacctgtacaagaacaacgagcataagaagggcgccaccttcaagctggaatcctgccacaagctgatcgatttcttcaagcggaacatccccaagtacaaggtgcaccctaccgacaactttggctgggacgtgttcggctttcacttcagccctaccagcagctacggcgacctgtctggcttctacagagaggtggaagcccagggatacaagctgtggttcagcgacgtgtccgaggcttacatcaacaaatgcgtggaagagggcaagctgttcctgttccaaatctacaacaaggacttctcccctaactccaccggcaagcccaacctgcacaccctgtattggaagggcctgttcgagcccgagaacctgaaagacgtggtgctgaagctgaatggcgaggccgagatcttctaccggaagcacagcatcaagcacgaggacaagaccatccacagagctaaggaccctatcgctaacaagaacgctgacaaccccaagaaacagagcgtgttcgattacgacatcatcaaggataagcggtatacccaggacaagttcttcttccacgtgccaatcagcctgaacttcaaaagccagggcgtcgtgcggttcaacgataagatcaacggcctgctggccgctcaggacgatgtgcatgtgatcggcatcgacagaggcgagagacatctgctgtactacaccgtggtcaacggcaagggcgaagtggtggaacagggcagcctgaatcaggtggccacagatcagggctacgtggtggattaccagcagaagctgcacgccaaagagaaagaacgcgaccaggccagaaagaactggtccaccatcgagaacatcaaagaactgaaggccggctacctgagccaggtggtgcataagctggctcagctgatcgtgaagcacaacgccatcgtgtgcctcgaggacctgaatttcggcttcaagaggggcagattcaaggtcgagaaacaggtgtaccagaagttcgagaaggctctgatcgacaagctgaactacctcgtgttcaaagagagaggcgccacacaggctggcggatacctgaatgcttaccagctggccgcacctttcgagagctttgagaagctgggcaagcagaccggcatcctgtactacgtgcggagcgactacaccagcaagatcgaccctgctaccggcttcgtggactttctgaagcctaagtacgagagcatggccaagagcaaagtgttcttcgagtccttcgagcgcatccagtggaaccaggccaaaggctacttcgagttcgagtttgactacaagaagatgtgccccagcagaaagttcggcgactacagaaccagatgggtcgtgtgcaccttcggcgacacccgctaccagaacagaagaaacaagagcagcggccagtgggagacagagacaatcgatgtgacagcccagctgaaagccctgttcgccgcttacggcatcacatacaatcaagaggataacatcaaggacgccattgccgccgtgaagtacaccaagttctacaagcagctgtactggctgctgagactgaccctgagcctgagacacagcgtgacaggcaccgacgaggatttcatcctgtctccagtggccgacgagaatggcgtgttctttgactctaggaaggccaccgacaagcagcctaaggacgctgatgctaacggcgcctaccatatcgccctgaaaggcctgtggaatctccagcagatcagacagcacgactggaacgtggaaaagcccaaaaagctgaacctcgccatgaagaacgaagagtggttcggcttcgctcagaagaagaagtttagagccagcggcggcaagaggcctgccgctacaaaaaaagccggccaggccaagaaaaagaagtgaccacacccccattcccccactccagatagaacttcagttatatctcacgtgtctggagtt

SEQ ID NO: 5831 - RNA, 46 nt, synthetic construct; identical to SEQ ID NO: 5779
  misc_feature 1..46: note = Category: MG29-1 sgRNA targeting human HAO-1
  misc_feature 1..46: note = Description: hH29-4_37
  source 1..46: mol_type = other RNA

SEQ ID NO: 5832 - RNA, 46 nt, synthetic construct
  misc_feature 1..46: note = Category: MG29-1 sgRNA targeting human HAO-1
  misc_feature 1..46: note = Description: hH29-21-37
  source 1..46: mol_type = other RNA
cttttaatttctactgttgtagatggacagagggtcagcatgccaa

SEQ ID NO: 5833 - RNA, 46 nt, synthetic construct
  misc_feature 1..46: note = Category: MG29-1 sgRNA targeting human HAO-1
  misc_feature 1..46: note = Description: hH29-23-37
  source 1..46: mol_type = other RNA
cttttaatttctactgttgtagattcagcctgtcagtccctgggaa

SEQ ID NO: 5834 - RNA, 46 nt, synthetic construct
  misc_feature 1..46: note = Category: MG29-1 sgRNA targeting human HAO-1
  misc_feature 1..46: note = Description: hH29-41-37
  source 1..46: mol_type = other RNA
cttttaatttctactgttgtagatatatcttcccagctgatagatg

SEQ ID NO: 5835 - RNA, 46 nt, synthetic construct; identical to SEQ ID NO: 5695
  misc_feature 1..46: note = Category: Guide modification chemistry
  misc_feature 1..46: note = Description: Chemistry 37 (22 nt spacer)
  misc_difference 25..46: note = any nucleotide
  source 1..46: mol_type = other RNA

SEQ ID NO: 5836 - RNA, 46 nt, synthetic construct; identical to SEQ ID NO: 5781
  misc_feature 1..46: note = Category: MG29-1 sgRNA targeting mouse HAO-1
  misc_feature 1..46: note = Description: mH29-29-37
  source 1..46: mol_type = other RNA

SEQ ID NO: 5837 - RNA, 46 nt, synthetic construct; identical to SEQ ID NO: 5781
  misc_feature 1..46: note = Category: MG29-1 sgRNA targeting mouse HAO-1
  misc_feature 1..46: note = Description: mH29-29-44
  source 1..46: mol_type = other RNA

SEQ ID NO: 5838 - RNA, 44 nt, synthetic construct; identical to SEQ ID NO: 5710
  misc_feature 1..44: note = Category: MG29-1 sgRNA targeting mouse HAO-1
  misc_feature 1..44: note = Description: mH29-29s-37
  source 1..44: mol_type = other RNA

SEQ ID NO: 5839 - RNA, 44 nt, synthetic construct; identical to SEQ ID NO: 5710
  misc_feature 1..44: note = Category: MG29-1 sgRNA targeting mouse HAO-1
  misc_feature 1..44: note = Description: mH29-29s-44
  source 1..44: mol_type = other RNA

SEQ ID NO: 5840 - RNA, 70 nt, synthetic construct; identical to SEQ ID NO: 5704
  misc_feature 1..70: note = Category: MG29-1 sgRNA targeting mouse HAO-1
  misc_feature 1..70: note = Description: mH29-29-50
  source 1..70: mol_type = other RNA

SEQ ID NO: 5841 - RNA, 68 nt, synthetic construct; identical to SEQ ID NO: 5705
  misc_feature 1..68: note = Category: MG29-1 sgRNA targeting mouse HAO-1
  misc_feature 1..68: note = Description: mH29-29-50b
  source 1..68: mol_type = other RNA

SEQ ID NO: 5842 - RNA, 68 nt, synthetic construct; identical to SEQ ID NO: 5705
  misc_feature 1..68: note = Category: MG29-1 sgRNA targeting mouse HAO-1
  misc_feature 1..68: note = Description: mH29-29-51b
  source 1..68: mol_type = other RNA

SEQ ID NO: 5843 - RNA, 68 nt, synthetic construct; identical to SEQ ID NO: 5705
  misc_feature 1..68: note = Category: MG29-1 sgRNA targeting mouse HAO-1
  misc_feature 1..68: note = Description: mH29-29-52b
  source 1..68: mol_type = other RNA

SEQ ID NO: 5844 - RNA, 68 nt, synthetic construct; identical to SEQ ID NO: 5705
  misc_feature 1..68: note = Category: MG29-1 sgRNA targeting mouse HAO-1
  misc_feature 1..68: note = Description: mH29-29-53b
  source 1..68: mol_type = other RNA

SEQ ID NO: 5845 - RNA, 68 nt, synthetic construct; identical to SEQ ID NO: 5705
  misc_feature 1..68: note = Category: MG29-1 sgRNA targeting mouse HAO-1
  misc_feature 1..68: note = Description: mH29-29-54b
  source 1..68: mol_type = other RNA

SEQ ID NO: 5846 - DNA, 4087 bp, synthetic construct; identical to SEQ ID NO: 5830
  misc_feature 1..4087: note = Category: DNA sequence encoding the MG29-1 messenger RNA
  misc_feature 1..4087: note = Description: DNA sequence encoding the MG29-1 messenger RNA
  source 1..4087: mol_type = other DNA

SEQ ID NO: 5847 - RNA, 42 nt, synthetic construct
  misc_feature 1..42: note = Category: MG29-1 sgRNA targeting mouse APO-A1
  misc_feature 1..42: note = Description: MG29-1-mouse APO-A1-sgRNA-A1
  source 1..42: mol_type = other RNA
taatttctactgttgtagatgctaatgtgtatgtggatgcgg

SEQ ID NO: 5848 - RNA, 42 nt, synthetic construct
  misc_feature 1..42: note = Category: MG29-1 sgRNA targeting mouse APO-A1
  misc_feature 1..42: note = Description: MG29-1-mouse APO-A1-sgRNA-B1
  source 1..42: mol_type = other RNA
taatttctactgttgtagataatcctcctccttgggccaaca

SEQ ID NO: 5849 - RNA, 42 nt, synthetic construct
  misc_feature 1..42: note = Category: MG29-1 sgRNA targeting mouse APO-A1
  misc_feature 1..42: note = Description: MG29-1-mouse APO-A1-sgRNA-C1
  source 1..42: mol_type = other RNA
taatttctactgttgtagatcttacttcagctgttggcccaa

SEQ ID NO: 5850 - RNA, 42 nt, synthetic construct
  misc_feature 1..42: note = Category: MG29-1 sgRNA targeting mouse APO-A1
  misc_feature 1..42: note = Description: MG29-1-mouse APO-A1-sgRNA-D1
  source 1..42: mol_type = other RNA
taatttctactgttgtagataccgcatccacatacacattag

SEQ ID NO: 5851 - RNA, 42 nt, synthetic construct
  misc_feature 1..42: note = Category: MG29-1 sgRNA targeting mouse APO-A1
  misc_feature 1..42: note = Description: MG29-1-mouse APO-A1-sgRNA-E1
  source 1..42: mol_type = other RNA
taatttctactgttgtagattcccattgggactggggttcat

SEQ ID NO: 5852 - RNA, 42 nt, synthetic construct
  misc_feature 1..42: note = Category: MG29-1 sgRNA targeting mouse APO-A1
  misc_feature 1..42: note = Description: MG29-1-mouse APO-A1-sgRNA-F1
  source 1..42: mol_type = other RNA
taatttctactgttgtagatgcgaccgcatgcgcacacacgt

SEQ ID NO: 5853 - RNA, 42 nt, synthetic construct
  misc_feature 1..42: note = Category: MG29-1 sgRNA targeting mouse APO-A1
  misc_feature 1..42: note = Description: MG29-1-mouse APO-A1-sgRNA-G1
  source 1..42: mol_type = other RNA
taatttctactgttgtagattcgccaagtgtcttcaggtggg

SEQ ID NO: 5854 - RNA, 42 nt, synthetic construct
  misc_feature 1..42: note = Category: MG29-1 sgRNA targeting mouse APO-A1
  misc_feature 1..42: note = Description: MG29-1-mouse APO-A1-sgRNA-H1
  source 1..42: mol_type = other RNA
taatttctactgttgtagatggccctggtgtggtactcgttc

SEQ ID NO: 5855 - RNA, 42 nt, synthetic construct
  misc_feature 1..42: note = Category: MG29-1 sgRNA targeting mouse APO-A1
  misc_feature 1..42: note = Description: MG29-1-mouse APO-A1-sgRNA-A2
  source 1..42: mol_type = other RNA
taatttctactgttgtagatgccctggtgtggtactcgttca

SEQ ID NO: 5856 - RNA, 42 nt, synthetic construct
  misc_feature 1..42: note = Category: MG29-1 sgRNA targeting mouse APO-A1
  misc_feature 1..42: note = Description: MG29-1-mouse APO-A1-sgRNA-B2
  source 1..42: mol_type = other RNA
taatttctactgttgtagatcatttcttctggaattcgtcca

SEQ ID NO: 5857 - RNA, 42 nt, synthetic construct
  misc_feature 1..42: note = Category: MG29-1 sgRNA targeting mouse APO-A1
  misc_feature 1..42: note = Description: MG29-1-mouse APO-A1-sgRNA-C2
  source 1..42: mol_type = other RNA
taatttctactgttgtagatttctggaattcgtccaggtagg

SEQ ID NO: 5858 - RNA, 42 nt, synthetic construct
  misc_feature 1..42: note = Category: MG29-1 sgRNA targeting mouse APO-A1
  misc_feature 1..42: note = Description: MG29-1-mouse APO-A1-sgRNA-D2
  source 1..42: mol_type = other RNA
taatttctactgttgtagatacttcctctaggtccttgttca

SEQ ID NO: 5859 - RNA, 42 nt, synthetic construct
  misc_feature 1..42: note = Category: MG29-1 sgRNA targeting mouse APO-A1
  misc_feature 1..42: note = Description: MG29-1-mouse APO-A1-sgRNA-E2
  source 1..42: mol_type = other RNA
taatttctactgttgtagattttctccaggttatcccagaag

SEQ ID NO: 5860 - RNA, 42 nt, synthetic construct
  misc_feature 1..42: note = Category: MG29-1 sgRNA targeting mouse APO-A1
  misc_feature 1..42: note = Description: MG29-1-mouse APO-A1-sgRNA-F2
  source 1..42: mol_type = other RNA
taatttctactgttgtagattccaggttatcccagaagtccc

SEQ ID NO: 5861 - DNA, 22 bp, unidentified
  misc_feature 1..22: note = Description of Unknown:MG29-1-mouse APO-A1-target site-A1 sequence
  misc_feature 1..22: note = Category: DNA Sequence of APO-A1 Target Site
  source 1..22: mol_type = genomic DNA; note = uncultivated organism sequence
gctaatgtgtatgtggatgcgg

SEQ ID NO: 5862 - DNA, 22 bp, unidentified
  misc_feature 1..22: note = Description of Unknown:MG29-1-mouse APO-A1-target site-B1 sequence
  misc_feature 1..22: note = Category: DNA Sequence of APO-A1 Target Site
  source 1..22: mol_type = genomic DNA; note = uncultivated organism sequence
aatcctcctccttgggccaaca

SEQ ID NO: 5863 - DNA, 22 bp, unidentified
  misc_feature 1..22: note = Description of Unknown:MG29-1-mouse APO-A1-target site-C1 sequence
  misc_feature 1..22: note = Category: DNA Sequence of APO-A1 Target Site
  source 1..22: mol_type = genomic DNA; note = uncultivated organism sequence
cttacttcagctgttggcccaa

SEQ ID NO: 5864 - DNA, 22 bp, unidentified
  misc_feature 1..22: note = Description of Unknown:MG29-1-mouse APO-A1-target site-D1 sequence
  misc_feature 1..22: note = Category: DNA Sequence of APO-A1 Target Site
  source 1..22: mol_type = genomic DNA; note = uncultivated organism sequence
accgcatccacatacacattag

SEQ ID NO: 5865 - DNA, 22 bp, unidentified
  misc_feature 1..22: note = Description of Unknown:MG29-1-mouse APO-A1-target site-E1 sequence
  misc_feature 1..22: note = Category: DNA Sequence of APO-A1 Target Site
  source 1..22: mol_type = genomic DNA; note = uncultivated organism sequence
tcccattgggactggggttcat

SEQ ID NO: 5866 - DNA, 22 bp, unidentified
  misc_feature 1..22: note = Description of Unknown:MG29-1-mouse APO-A1-target site-F1 sequence
  misc_feature 1..22: note = Category: DNA Sequence of APO-A1 Target Site
  source 1..22: mol_type = genomic DNA; note = uncultivated organism sequence
gcgaccgcatgcgcacacacgt

SEQ ID NO: 5867 - DNA, 22 bp, unidentified
  misc_feature 1..22: note = Description of Unknown:MG29-1-mouse APO-A1-target site-G1 sequence
  misc_feature 1..22: note = Category: DNA Sequence of APO-A1 Target Site
  source 1..22: mol_type = genomic DNA; note = uncultivated organism sequence
tcgccaagtgtcttcaggtggg

SEQ ID NO: 5868 - DNA, 22 bp, unidentified
  misc_feature 1..22: note = Description of Unknown:MG29-1-mouse APO-A1-target site-H1 sequence
  misc_feature 1..22: note = Category: DNA Sequence of APO-A1 Target Site
  source 1..22: mol_type = genomic DNA; note = uncultivated organism sequence
ggccctggtgtggtactcgttc

SEQ ID NO: 5869 - DNA, 22 bp, unidentified
  misc_feature 1..22: note = Description of Unknown:MG29-1-mouse APO-A1-target site-A2 sequence
  misc_feature 1..22: note = Category: DNA Sequence of APO-A1 Target Site
  source 1..22: mol_type = genomic DNA; note = uncultivated organism sequence
gccctggtgtggtactcgttca

SEQ ID NO: 5870 - DNA, 22 bp, unidentified
  misc_feature 1..22: note = Description of Unknown:MG29-1-mouse APO-A1-target site-B2 sequence
  misc_feature 1..22: note = Category: DNA Sequence of APO-A1 Target Site
  source 1..22: mol_type = genomic DNA; note = uncultivated organism sequence
catttcttctggaattcgtcca

SEQ ID NO: 5871 - DNA, 22 bp, unidentified
  misc_feature 1..22: note = Description of Unknown:MG29-1-mouse APO-A1-target site-C2 sequence
  misc_feature 1..22: note = Category: DNA Sequence of APO-A1 Target Site
  source 1..22: mol_type = genomic DNA; note = uncultivated organism sequence
ttctggaattcgtccaggtagg

SEQ ID NO: 5872 - DNA, 22 bp, unidentified
  misc_feature 1..22: note = Description of Unknown:MG29-1-mouse APO-A1-target site-D2 sequence
  misc_feature 1..22: note = Category: DNA Sequence of APO-A1 Target Site
  source 1..22: mol_type = genomic DNA; note = uncultivated organism sequence
acttcctctaggtccttgttca

SEQ ID NO: 5873 - DNA, 22 bp, unidentified
  misc_feature 1..22: note = Description of Unknown:MG29-1-mouse APO-A1-target site-E2 sequence
  misc_feature 1..22: note = Category: DNA Sequence of APO-A1 Target Site
  source 1..22: mol_type = genomic DNA; note = uncultivated organism sequence
tttctccaggttatcccagaag

SEQ ID NO: 5874 - DNA, 22 bp, unidentified
  misc_feature 1..22: note = Description of Unknown:MG29-1-mouse APO-A1-target site-F2 sequence
  misc_feature 1..22: note = Category: DNA Sequence of APO-A1 Target Site
  source 1..22: mol_type = genomic DNA; note = uncultivated organism sequence
tccaggttatcccagaagtccc

SEQ ID NO: 5875 - RNA, 42 nt, synthetic construct
  misc_feature 1..42: note = Category: MG29-1 sgRNA targeting mouse ANGPTL3
  misc_feature 1..42: note = Description: MG29-1-mouse ANGPTL3-sgRNA-A1
  source 1..42: mol_type = other RNA
taatttctactgttgtagattgttgttcctttagtaattgca

SEQ ID NO: 5876 - RNA, 42 nt, synthetic construct
  misc_feature 1..42: note = Category: MG29-1 sgRNA targeting mouse ANGPTL3
  misc_feature 1..42: note = Description: MG29-1-mouse ANGPTL3-sgRNA-B1
  source 1..42: mol_type = other RNA
taatttctactgttgtagatgttgttcctttagtaattgcat

SEQ ID NO: 5877 - RNA, 42 nt, synthetic construct
  misc_feature 1..42: note = Category: MG29-1 sgRNA targeting mouse ANGPTL3
  misc_feature 1..42: note = Description: MG29-1-mouse ANGPTL3-sgRNA-C1
  source 1..42: mol_type = other RNA
taatttctactgttgtagatttgttcctttagtaattgcatc

SEQ ID NO: 5878 - RNA, 42 nt, synthetic construct
  misc_feature 1..42: note = Category: MG29-1 sgRNA targeting mouse ANGPTL3
  misc_feature 1..42: note = Description: MG29-1-mouse ANGPTL3-sgRNA-D1
  source 1..42: mol_type = other RNA
taatttctactgttgtagatgtaattgcatccagagtggatc

SEQ ID NO: 5879 - RNA, 42 nt, synthetic construct
  misc_feature 1..42: note = Category: MG29-1 sgRNA targeting mouse ANGPTL3
  misc_feature 1..42: note = Description: MG29-1-mouse ANGPTL3-sgRNA-E1
  source 1..42: mol_type = other RNA
taatttctactgttgtagatatcatttgattctgcaccttca

SEQ ID NO: 5880 - RNA, 42 nt, synthetic construct
  misc_feature 1..42: note = Category: MG29-1 sgRNA targeting mouse ANGPTL3
  misc_feature 1..42: note = Description: MG29-1-mouse ANGPTL3-sgRNA-F1
  source 1..42: mol_type = other RNA
taatttctactgttgtagatattctgcaccttcagagccaaa

SEQ ID NO: 5881 - RNA, 42 nt, synthetic construct
  misc_feature 1..42: note = Category: MG29-1 sgRNA targeting mouse ANGPTL3
  misc_feature 1..42: note = Description: MG29-1-mouse ANGPTL3-sgRNA-G1
  source 1..42: mol_type = other RNA
taatttctactgttgtagatctatgttggatgatgtcaaaat

SEQ ID NO: 5882 - RNA, 42 nt, synthetic construct
  misc_feature 1..42: note = Category: MG29-1 sgRNA targeting mouse ANGPTL3
  misc_feature 1..42: note = Description: MG29-1-mouse ANGPTL3-sgRNA-H1
  source 1..42: mol_type = other RNA
taatttctactgttgtagatagcgaatggcctcctgcagctg

SEQ ID NO: 5883 - RNA, 42 nt, synthetic construct
  misc_feature 1..42: note = Category: MG29-1 sgRNA targeting mouse ANGPTL3
  misc_feature 1..42: note = Description: MG29-1-mouse ANGPTL3-sgRNA-A2
  source 1..42: mol_type = other RNA
taatttctactgttgtagatgcgaatggcctcctgcagctgg

SEQ ID NO: 5884 - RNA, 42 nt, synthetic construct
  misc_feature 1..42: note = Category: MG29-1 sgRNA targeting mouse ANGPTL3
  misc_feature 1..42: note = Description: MG29-1-mouse ANGPTL3-sgRNA-B2
  source 1..42: mol_type = other RNA
taatttctactgttgtagatgtccataagactaagggacaaa

SEQ ID NO: 5885 - RNA, 42 nt, synthetic construct
  misc_feature 1..42: note = Category: MG29-1 sgRNA targeting mouse ANGPTL3
  misc_feature 1..42: note = Description: MG29-1-mouse ANGPTL3-sgRNA-C2
  source 1..42: mol_type = other RNA
taatttctactgttgtagattccataagactaagggacaaat

SEQ ID NO: 5886 - RNA, 42 nt, synthetic construct
  misc_feature 1..42: note = Category: MG29-1 sgRNA targeting mouse ANGPTL3
  misc_feature 1..42: note = Description: MG29-1-mouse ANGPTL3-sgRNA-D2
  source 1..42: mol_type = other RNA
taatttctactgttgtagatagaagctcaacatatttgatca

SEQ ID NO: 5887 - RNA, 42 nt, synthetic construct
  misc_feature 1..42: note = Category: MG29-1 sgRNA targeting mouse ANGPTL3
  misc_feature 1..42: note = Description: MG29-1-mouse ANGPTL3-sgRNA-E2
  source 1..42: mol_type = other RNA
taatttctactgttgtagatatcagtctttttatgacctatc

SEQ ID NO: 5888 - RNA, 42 nt, synthetic construct
  misc_feature 1..42: note = Category: MG29-1 sgRNA targeting mouse ANGPTL3
  misc_feature 1..42: note = Description: MG29-1-mouse ANGPTL3-sgRNA-F2
  source 1..42: mol_type = other RNA
taatttctactgttgtagattatgacctatcacttcgaacca

SEQ ID NO: 5889 - RNA, 42 nt, synthetic construct
  misc_feature 1..42: note = Category: MG29-1 sgRNA targeting mouse ANGPTL3
  misc_feature 1..42: note = Description: MG29-1-mouse ANGPTL3-sgRNA-G2
  source 1..42: mol_type = other RNA
taatttctactgttgtagatatgacctatcacttcgaaccaa

SEQ ID NO: 5890 - RNA, 42 nt, synthetic construct
  misc_feature 1..42: note = Category: MG29-1 sgRNA targeting mouse ANGPTL3
  misc_feature 1..42: note = Description: MG29-1-mouse ANGPTL3-sgRNA-H2
  source 1..42: mol_type = other RNA
taatttctactgttgtagattgacctatcacttcgaaccaat

SEQ ID NO: 5891 - RNA, 42 nt, synthetic construct
  misc_feature 1..42: note = Category: MG29-1 sgRNA targeting mouse ANGPTL3
  misc_feature 1..42: note = Description: MG29-1-mouse ANGPTL3-sgRNA-A3
  source 1..42: mol_type = other RNA
taatttctactgttgtagatgaggagcagctaaccaacttaa

SEQ ID NO: 5892 - RNA, 42 nt, synthetic construct
  misc_feature 1..42: note = Category: MG29-1 sgRNA targeting mouse ANGPTL3
  misc_feature 1..42: note = Description: MG29-1-mouse ANGPTL3-sgRNA-B3
  source 1..42: mol_type = other RNA
taatttctactgttgtagattacttactttgagtgatgttac

SEQ ID NO: 5893 - RNA, 42 nt, synthetic construct
  misc_feature 1..42: note = Category: MG29-1 sgRNA targeting mouse ANGPTL3
  misc_feature 1..42: note = Description: MG29-1-mouse ANGPTL3-sgRNA-C3
  source 1..42: mol_type = other RNA
taatttctactgttgtagatagtgatgttacttctgggtgct

SEQ ID NO: 5894 - RNA, 42 nt, synthetic construct
  misc_feature 1..42: note = Category: MG29-1 sgRNA targeting mouse ANGPTL3
  misc_feature 1..42: note = Description: MG29-1-mouse ANGPTL3-sgRNA-D3
  source 1..42: mol_type = other RNA
taatttctactgttgtagatagttcagttctactgacatgtt

SEQ ID NO: 5895 - RNA, 42 nt, synthetic construct
  misc_feature 1..42: note = Category: MG29-1 sgRNA targeting mouse ANGPTL3
  misc_feature 1..42: note = Description: MG29-1-mouse ANGPTL3-sgRNA-E3
  source 1..42: mol_type = other RNA
taatttctactgttgtagattaacttgtagtgtagatgtagt

SEQ ID NO: 5896 - RNA, 42 nt, synthetic construct
  misc_feature 1..42: note = Category: MG29-1 sgRNA targeting mouse ANGPTL3
  misc_feature 1..42: note = Description: MG29-1-mouse ANGPTL3-sgRNA-F3
  source 1..42: mol_type = other RNA
taatttctactgttgtagataacttgtagtgtagatgtagtt

SEQ ID NO: 5897 - RNA, 42 nt, synthetic construct
  misc_feature 1..42: note = Category: MG29-1 sgRNA targeting mouse ANGPTL3
  misc_feature 1..42: note = Description: MG29-1-mouse ANGPTL3-sgRNA-G3
  source 1..42: mol_type = other RNA
taatttctactgttgtagatacttgtagtgtagatgtagttc

SEQ ID NO: 5898 - RNA, 42 nt, synthetic construct
  misc_feature 1..42: note = Category: MG29-1 sgRNA targeting mouse ANGPTL3
  misc_feature 1..42: note = Description: MG29-1-mouse ANGPTL3-sgRNA-H3
  source 1..42: mol_type = other RNA
taatttctactgttgtagatcctcttctttgatttcattggt

SEQ ID NO: 5899 - RNA, 42 nt, synthetic construct
  misc_feature 1..42: note = Category: MG29-1 sgRNA targeting mouse ANGPTL3
  misc_feature 1..42: note = Description: MG29-1-mouse ANGPTL3-sgRNA-A4
  source 1..42: mol_type = other RNA
taatttctactgttgtagatctcttctttgatttcattggtt

SEQ ID NO: 5900 - RNA, 42 nt, synthetic construct
  misc_feature 1..42: note = Category: MG29-1 sgRNA targeting mouse ANGPTL3
  misc_feature 1..42: note = Description: MG29-1-mouse ANGPTL3-sgRNA-B4
  source 1..42: mol_type = other RNA
taatttctactgttgtagatatttcattggttcgaagtgata

SEQ ID NO: 5901 - RNA, 42 nt, synthetic construct
  misc_feature 1..42: note = Category: MG29-1 sgRNA targeting mouse ANGPTL3
  misc_feature 1..42: note = Description: MG29-1-mouse ANGPTL3-sgRNA-C4
  source 1..42: mol_type = other RNA
taatttctactgttgtagatattggttcgaagtgataggtca

SEQ ID NO: 5902 - RNA, 42 nt, synthetic construct
  misc_feature 1..42: note = Category: MG29-1 sgRNA targeting mouse ANGPTL3
  misc_feature 1..42: note = Description: MG29-1-mouse ANGPTL3-sgRNA-D4
  source 1..42: mol_type = other RNA
taatttctactgttgtagattcccttagtcttatggacaaaa

SEQ ID NO: 5903 - RNA, 42 nt, synthetic construct
  misc_feature 1..42: note = Category: MG29-1 sgRNA targeting mouse ANGPTL3
  misc_feature 1..42: note = Description: MG29-1-mouse ANGPTL3-sgRNA-E4
  source 1..42: mol_type = other RNA
taatttctactgttgtagatagtccatgacccagctgcagga

SEQ ID NO: 5904 - RNA, 42 nt, synthetic construct
  misc_feature 1..42: note = Category: MG29-1 sgRNA targeting mouse ANGPTL3
  misc_feature 1..42: note = Description: MG29-1-mouse ANGPTL3-sgRNA-F4
  source 1..42: mol_type = other RNA
taatttctactgttgtagatgacatcatccaacatagcaaat

SEQ ID NO: 5905 - RNA, 42 nt, synthetic construct
  misc_feature 1..42: note = Category: MG29-1 sgRNA targeting mouse ANGPTL3
  misc_feature 1..42: note = Description: MG29-1-mouse ANGPTL3-sgRNA-G4
  source 1..42: mol_type = other RNA
taatttctactgttgtagatacatcatccaacatagcaaatc

SEQ ID NO: 5906 - RNA, 42 nt, synthetic construct
  misc_feature 1..42: note = Category: MG29-1 sgRNA targeting mouse ANGPTL3
  misc_feature 1..42: note = Description: MG29-1-mouse ANGPTL3-sgRNA-H4
  source 1..42: mol_type = other RNA
taatttctactgttgtagatggctctgaaggtgcagaatcaa

SEQ ID NO: 5907 - RNA, 42 nt, synthetic construct
  misc_feature 1..42: note = Category: MG29-1 sgRNA targeting mouse ANGPTL3
  misc_feature 1..42: note = Description: MG29-1-mouse ANGPTL3-sgRNA-A5
  source 1..42: mol_type = other RNA
taatttctactgttgtagatgctctgaaggtgcagaatcaaa

SEQ ID NO: 5908 - RNA, 42 nt, synthetic construct
  misc_feature 1..42: note = Category: MG29-1 sgRNA targeting mouse ANGPTL3
  misc_feature 1..42: note = Description: MG29-1-mouse ANGPTL3-sgRNA-B5
  source 1..42: mol_type = other RNA
taatttctactgttgtagatgtagaacagcaagacaacagca

SEQ ID NO: 5909 - RNA, 42 nt, synthetic construct
  misc_feature 1..42: note = Category: MG29-1 sgRNA targeting mouse ANGPTL3
  misc_feature 1..42: note = Description: MG29-1-mouse ANGPTL3-sgRNA-C5
  source 1..42: mol_type = other RNA
taatttctactgttgtagattagaacagcaagacaacagcat

SEQ ID NO: 5910 - RNA, 42 nt, synthetic construct
  misc_feature 1..42: note = Category: MG29-1 sgRNA targeting mouse ANGPTL3
  misc_feature 1..42: note = Description: MG29-1-mouse ANGPTL3-sgRNA-D5
  source 1..42: mol_type = other RNA
taatttctactgttgtagatctatttcttttatctgcatgtg

SEQ ID NO: 5911 - RNA, 42 nt, synthetic construct
  misc_feature 1..42: note = Category: MG29-1 sgRNA targeting mouse ANGPTL3
  misc_feature 1..42: note = Description: MG29-1-mouse ANGPTL3-sgRNA-E5
  source 1..42: mol_type = other RNA
taatttctactgttgtagattatttcttttatctgcatgtgc

SEQ ID NO: 5912 - RNA, 42 nt, synthetic construct
  misc_feature 1..42: note = Category: MG29-1 sgRNA targeting mouse ANGPTL3
  misc_feature 1..42: note = Description: MG29-1-mouse ANGPTL3-sgRNA-F5
  source 1..42: mol_type = other RNA
taatttctactgttgtagatttttatctgcatgtgctgttga

SEQ ID NO: 5913 - RNA, 42 nt, synthetic construct
  misc_feature 1..42: note = Category: MG29-1 sgRNA targeting mouse ANGPTL3
  misc_feature 1..42: note = Description: MG29-1-mouse ANGPTL3-sgRNA-G5
  source 1..42: mol_type = other RNA
taatttctactgttgtagatatctgcatgtgctgttgactta

SEQ ID NO: 5914 - RNA, 42 nt, synthetic construct
  misc_feature 1..42: note = Category: MG29-1 sgRNA targeting mouse ANGPTL3
  misc_feature 1..42: note = Description: MG29-1-mouse ANGPTL3-sgRNA-H5
  source 1..42: mol_type = other RNA
taatttctactgttgtagattctgcatgtgctgttgacttaa

SEQ ID NO: 5915 - RNA, 42 nt, synthetic construct
  misc_feature 1..42: note = Category: MG29-1 sgRNA targeting mouse ANGPTL3
  misc_feature 1..42: note = Description: MG29-1-mouse ANGPTL3-sgRNA-A6
  source 1..42: mol_type = other RNA
taatttctactgttgtagattactgttcttccacactctgga

SEQ ID NO: 5916 - RNA, 42 nt, synthetic construct
  misc_feature 1..42: note = Category: MG29-1 sgRNA targeting mouse ANGPTL3
  misc_feature 1..42: note = Description: MG29-1-mouse ANGPTL3-sgRNA-B6
  source 1..42: mol_type = other RNA
taatttctactgttgtagattattcttttatcagctcagaaa

SEQ ID NO: 5917 - RNA, 42 nt, synthetic construct
  misc_feature 1..42: note = Category: MG29-1 sgRNA targeting mouse ANGPTL3
  misc_feature 1..42: note = Description: MG29-1-mouse ANGPTL3-sgRNA-C6
  source 1..42: mol_type = other RNA
taatttctactgttgtagatatcagctcagaaagactggtat

SEQ ID NO: 5918 - RNA, 42 nt, synthetic construct
  misc_feature 1..42: note = Category: MG29-1 sgRNA targeting mouse ANGPTL3
  misc_feature 1..42: note = Description: MG29-1-mouse ANGPTL3-sgRNA-D6
  source 1..42: mol_type = other RNA
taatttctactgttgtagattcagctcagaaagactggtatt

SEQ ID NO: 5919 - RNA, 42 nt, synthetic construct
  misc_feature 1..42: note = Category: MG29-1 sgRNA targeting mouse ANGPTL3
  misc_feature 1..42: note = Description: MG29-1-mouse ANGPTL3-sgRNA-E6
  source 1..42: mol_type = other RNA
taatttctactgttgtagatttctaaatcaagagcaccaaga

SEQ ID NO: 5920 - RNA, 42 nt, synthetic construct
  misc_feature 1..42: note = Category: MG29-1 sgRNA targeting mouse ANGPTL3
  misc_feature 1..42: note = Description: MG29-1-mouse ANGPTL3-sgRNA-F6
  source 1..42: mol_type = other RNA
taatttctactgttgtagatctgtttcgttcagttgaagagg

SEQ ID NO: 5921 - RNA, 42 nt, synthetic construct
  misc_feature 1..42: note = Category: MG29-1 sgRNA targeting mouse ANGPTL3
  misc_feature 1..42: note = Description: MG29-1-mouse ANGPTL3-sgRNA-G6
  source 1..42: mol_type = other RNA
taatttctactgttgtagattgtttcgttcagttgaagaggg

SEQ ID NO: 5922 - RNA, 42 nt, synthetic construct
  misc_feature 1..42: note = Category: MG29-1 sgRNA targeting mouse ANGPTL3
  misc_feature 1..42: note = Description: MG29-1-mouse ANGPTL3-sgRNA-H6
  source 1..42: mol_type = other RNA
taatttctactgttgtagatgttcagttgaagagggggagta

SEQ ID NO: 5923 - RNA, 42 nt, synthetic construct
  misc_feature 1..42: note = Category: MG29-1 sgRNA targeting mouse ANGPTL3
  misc_feature 1..42: note = Description: MG29-1-mouse ANGPTL3-sgRNA-A7
  source 1..42: mol_type = other RNA
taatttctactgttgtagatgaagaaagagaattttctgagg

SEQ ID NO: 5924 - RNA, 42 nt, synthetic construct
  misc_feature 1..42: note = Category: MG29-1 sgRNA targeting mouse ANGPTL3
  misc_feature 1..42: note = Description: MG29-1-mouse ANGPTL3-sgRNA-B7
  source 1..42: mol_type = other RNA
taatttctactgttgtagatctgagggttcttgaataccagt

SEQ ID NO: 5925 - RNA, 42 nt, synthetic construct
  misc_feature 1..42: note = Category: MG29-1 sgRNA targeting mouse ANGPTL3
  misc_feature 1..42: note = Description: MG29-1-mouse ANGPTL3-sgRNA-C7
  source 1..42: mol_type = other RNA
taatttctactgttgtagattgagggttcttgaataccagtc

SEQ ID NO: 5926 - RNA, 42 nt, synthetic construct
  misc_feature 1..42: note = Category: MG29-1 sgRNA targeting mouse ANGPTL3
  misc_feature 1..42: note = Description: MG29-1-mouse ANGPTL3-sgRNA-D7
  source 1..42: mol_type = other RNA
taatttctactgttgtagattaacagaggcgaacatacaagt

SEQ ID NO: 5927 - RNA, 42 nt, synthetic construct
  misc_feature 1..42: note = Category: MG29-1 sgRNA targeting mouse ANGPTL3
  misc_feature 1..42: note = Description: MG29-1-mouse ANGPTL3-sgRNA-E7
  source 1..42: mol_type = other RNA
taatttctactgttgtagatatgtctactgtgatacccaatc

SEQ ID NO: 5928 - RNA, 42 nt, synthetic construct
  misc_feature 1..42: note = Category: MG29-1 sgRNA targeting mouse ANGPTL3
  misc_feature 1..42: note = Description: MG29-1-mouse ANGPTL3-sgRNA-F7
  source 1..42: mol_type = other RNA
taatttctactgttgtagatcatgggtttacctgattgggta

SEQ ID NO: 5929 - RNA, 42 nt, synthetic construct
  misc_feature 1..42: note = Category: MG29-1 sgRNA targeting mouse ANGPTL3
  misc_feature 1..42: note = Description: MG29-1-mouse ANGPTL3-sgRNA-G7
  source 1..42: mol_type = other RNA
taatttctactgttgtagatcctgattgggtatcacagtaga

SEQ ID NO: 5930 - RNA, 42 nt, synthetic construct
  misc_feature 1..42: note = Category: MG29-1 sgRNA targeting mouse ANGPTL3
  misc_feature 1..42: note = Description: MG29-1-mouse ANGPTL3-sgRNA-H7
  source 1..42: mol_type = other RNA
taatttctactgttgtagatttggtttaatagtgtacacgcc

SEQ ID NO: 5931 - RNA, 42 nt, synthetic construct
  misc_feature 1..42: note = Category: MG29-1 sgRNA targeting mouse ANGPTL3
  misc_feature 1..42: note = Description: MG29-1-mouse ANGPTL3-sgRNA-A8
  source 1..42: mol_type = other RNA
taatttctactgttgtagatatagtgtacacgccacttgtat

SEQ ID NO: 5932 - RNA, 42 nt, synthetic construct
  misc_feature 1..42: note = Category: MG29-1 sgRNA targeting mouse ANGPTL3
  misc_feature 1..42: note = Description: MG29-1-mouse ANGPTL3-sgRNA-B8
  source 1..42: mol_type = other RNA
taatttctactgttgtagatccatcgagcctcccaaagccct

SEQ ID NO: 5933 - RNA, 42 nt, synthetic construct
  misc_feature 1..42: note = Category: MG29-1 sgRNA targeting mouse ANGPTL3
  misc_feature 1..42: note = Description: MG29-1-mouse ANGPTL3-sgRNA-C8
  source 1..42: mol_type = other RNA
taatttctactgttgtagatcgtagttttcccatgtttcgtt

SEQ ID NO: 5934 - RNA, 42 nt, synthetic construct
  misc_feature 1..42: note = Category: MG29-1 sgRNA targeting mouse ANGPTL3
  misc_feature 1..42: note = Description: MG29-1-mouse ANGPTL3-sgRNA-D8
  source 1..42: mol_type = other RNA
taatttctactgttgtagatgtagttttcccatgtttcgttg

SEQ ID NO: 5935 - RNA, 42 nt, synthetic construct
  misc_feature 1..42: note = Category: MG29-1 sgRNA targeting mouse ANGPTL3
  misc_feature 1..42: note = Description: MG29-1-mouse ANGPTL3-sgRNA-E8
  source 1..42: mol_type = other RNA
taatttctactgttgtagatcccatgtttcgttgaagtcctg

SEQ ID NO: 5936 - RNA, 42 nt, synthetic construct
  misc_feature 1..42: note = Category: MG29-1 sgRNA targeting mouse ANGPTL3
  misc_feature 1..42: note = Description: MG29-1-mouse ANGPTL3-sgRNA-F8
  source 1..42: mol_type = other RNA
taatttctactgttgtagatccatgtttcgttgaagtcctgt

SEQ ID NO: 5937 - RNA, 42 nt, synthetic construct
  misc_feature 1..42: note = Category: MG29-1 sgRNA targeting mouse ANGPTL3
  misc_feature 1..42: note = Description: MG29-1-mouse ANGPTL3-sgRNA-G8
  source 1..42: mol_type = other RNA
taatttctactgttgtagatgttgaagtcctgtgagccatct

SEQ ID NO: 5938 - RNA, 42 nt, synthetic construct
  misc_feature 1..42: note = Category: MG29-1 sgRNA targeting mouse ANGPTL3
  misc_feature 1..42: note = Description: MG29-1-mouse ANGPTL3-sgRNA-H8
  source 1..42: mol_type = other RNA
taatttctactgttgtagatcggtgttgaattaatgtccatg

SEQ ID NO: 5939 - RNA, 42 nt, synthetic construct
  misc_feature 1..42: note = Category: MG29-1 sgRNA targeting mouse ANGPTL3
  misc_feature 1..42: note = Description: MG29-1-mouse ANGPTL3-sgRNA-A9
  source 1..42: mol_type = other RNA
taatttctactgttgtagatccctctaacttttttctttagg

SEQ ID NO: 5940 - RNA, 42 nt, synthetic construct
  misc_feature 1..42: note = Category: MG29-1 sgRNA targeting mouse ANGPTL3
  misc_feature 1..42: note = Description: MG29-1-mouse ANGPTL3-sgRNA-B9
  source 1..42: mol_type = other RNA
taatttctactgttgtagatcctctaacttttttctttagga

SEQ ID NO: 5941 - RNA, 42 nt, synthetic construct
  misc_feature 1..42: note = Category: MG29-1 sgRNA targeting mouse ANGPTL3
  misc_feature 1..42: note = Description: MG29-1-mouse ANGPTL3-sgRNA-C9
  source 1..42: mol_type = other RNA
taatttctactgttgtagatttctttaggagaattttggttg

SEQ ID NO: 5942 - RNA, 42 nt, synthetic construct
  misc_feature 1..42: note = Category: MG29-1 sgRNA targeting mouse ANGPTL3
  misc_feature 1..42: note = Description: MG29-1-mouse ANGPTL3-sgRNA-D9
  source 1..42: mol_type = other RNA
taatttctactgttgtagattctttaggagaattttggttgg

SEQ ID NO: 5943 - RNA, 42 nt, synthetic construct
  misc_feature 1..42: note = Category: MG29-1 sgRNA targeting mouse ANGPTL3
  misc_feature 1..42: note = Description: MG29-1-mouse ANGPTL3-sgRNA-E9
  source 1..42: mol_type = other RNA
taatttctactgttgtagatctttaggagaattttggttggg

SEQ ID NO: 5944 - RNA, 42 nt, synthetic construct
  misc_feature 1..42: note = Category: MG29-1 sgRNA targeting mouse ANGPTL3
  misc_feature 1..42: note = Description: MG29-1-mouse ANGPTL3-sgRNA-F9
  source 1..42: mol_type = other RNA
taatttctactgttgtagattttaggagaattttggttgggc

SEQ ID NO: 5945 - RNA, 42 nt, synthetic construct
  misc_feature 1..42: note = Category: MG29-1 sgRNA targeting mouse ANGPTL3
  misc_feature 1..42: note = Description: MG29-1-mouse ANGPTL3-sgRNA-G9
  source 1..42: mol_type = other RNA
taatttctactgttgtagatggagaattttggttgggcctag

SEQ ID NO: 5946 - RNA, 42 nt, synthetic construct
  misc_feature 1..42: note = Category: MG29-1 sgRNA targeting mouse ANGPTL3
  misc_feature 1..42: note = Description: MG29-1-mouse ANGPTL3-sgRNA-H9
  source 1..42: mol_type = other RNA
taatttctactgttgtagatggttgggcctagagaagatcta

SEQ ID NO: 5947 - RNA, 42 nt, synthetic construct
  misc_feature 1..42: note = Category: MG29-1 sgRNA targeting mouse ANGPTL3
  misc_feature 1..42: note = Description: MG29-1-mouse ANGPTL3-sgRNA-A10
  source 1..42: mol_type = other RNA
taatttctactgttgtagatgttgggcctagagaagatctat

SEQ ID NO: 5948 - RNA, 42 nt, synthetic construct
  misc_feature 1..42: note = Category: MG29-1 sgRNA targeting mouse ANGPTL3
  misc_feature 1..42: note = Description: MG29-1-mouse ANGPTL3-sgRNA-B10
  source 1..42: mol_type = other RNA
taatttctactgttgtagatacgactcgagctacaagactgg

SEQ ID NO: 5949 - RNA, 42 nt, synthetic construct
  misc_feature 1..42: note = Category: MG29-1 sgRNA targeting mouse ANGPTL3
  misc_feature 1..42: note = Description: MG29-1-mouse ANGPTL3-sgRNA-C10
  source 1..42: mol_type = other RNA
taatttctactgttgtagatcgactcgagctacaagactgga

SEQ ID NO: 5950 - RNA, 42 nt, synthetic construct
  misc_feature 1..42: note = Category: MG29-1 sgRNA targeting mouse ANGPTL3
  misc_feature 1..42: note = Description: MG29-1-mouse ANGPTL3-sgRNA-D10
  source 1..42: mol_type = other RNA
taatttctactgttgtagatacctgggcagtcacgaaaccaa

SEQ ID NO: 5951 - RNA, 42 nt, synthetic construct
  misc_feature 1..42: note = Category: MG29-1 sgRNA targeting mouse ANGPTL3
  misc_feature 1..42: note = Description: MG29-1-mouse ANGPTL3-sgRNA-E10
  source 1..42: mol_type = other RNA
taatttctactgttgtagatgtgactgcccaggtgaaaggag

SEQ ID NO: 5952 - RNA, 42 nt, synthetic construct
  misc_feature 1..42: note = Category: MG29-1 sgRNA targeting mouse ANGPTL3
  misc_feature 1..42: note = Description: MG29-1-mouse ANGPTL3-sgRNA-F10
  source 1..42: mol_type = other RNA
taatttctactgttgtagatcagtcttgtagctcgagtcgta

SEQ ID NO: 5953 - DNA, 22 bp, Mus sp.
  misc_feature 1..22: note = Description of Unknown:MG29-1-mouse ANGPTL3-target site-A1 sequence
  misc_feature 1..22: note = Category: DNA Sequence of ANGPTL3 Target Site
  source 1..22: mol_type = genomic DNA
tgttgttcctttagtaattgca

SEQ ID NO: 5954 - DNA, 22 bp, Mus sp.
  misc_feature 1..22: note = Description of Unknown:MG29-1-mouse ANGPTL3-target site-B1 sequence
  misc_feature 1..22: note = Category: DNA Sequence of ANGPTL3 Target Site
  source 1..22: mol_type = genomic DNA
gttgttcctttagtaattgcat

SEQ ID NO: 5955 - DNA, 22 bp, Mus sp.
  misc_feature 1..22: note = Description of Unknown:MG29-1-mouse ANGPTL3-target site-C1 sequence
  misc_feature 1..22: note = Category: DNA Sequence of ANGPTL3 Target Site
  source 1..22: mol_type = genomic DNA
ttgttcctttagtaattgcatc

SEQ ID NO: 5956 - DNA, 22 bp, Mus sp.
  misc_feature 1..22: note = Description of Unknown:MG29-1-mouse ANGPTL3-target site-D1 sequence
  misc_feature 1..22: note = Category: DNA Sequence of ANGPTL3 Target Site
  source 1..22: mol_type = genomic DNA
gtaattgcatccagagtggatc

SEQ ID NO: 5957 - DNA, 22 bp, Mus sp.
  misc_feature 1..22: note = Description of Unknown:MG29-1-mouse ANGPTL3-target site-E1 sequence
  misc_feature 1..22: note = Category: DNA Sequence of ANGPTL3 Target Site
  source 1..22: mol_type = genomic DNA
atcatttgattctgcaccttca

SEQ ID NO: 5958 - DNA, 22 bp, Mus sp.
  misc_feature 1..22: note = Description of Unknown:MG29-1-mouse ANGPTL3-target site-F1 sequence
  misc_feature 1..22: note = Category: DNA Sequence of ANGPTL3 Target Site
  source 1..22: mol_type = genomic DNA
attctgcaccttcagagccaaa

SEQ ID NO: 5959 - DNA, 22 bp, Mus sp.
  misc_feature 1..22: note = Description of Unknown:MG29-1-mouse ANGPTL3-target site-G1 sequence
  misc_feature 1..22: note = Category: DNA Sequence of ANGPTL3 Target Site
  source 1..22: mol_type = genomic DNA
ctatgttggatgatgtcaaaat

SEQ ID NO: 5960 - DNA, 22 bp, Mus sp.
  misc_feature 1..22: note = Description of Unknown:MG29-1-mouse ANGPTL3-target site-H1 sequence
  misc_feature 1..22: note = Category: DNA Sequence of ANGPTL3 Target Site
  source 1..22: mol_type = genomic DNA
agcgaatggcctcctgcagctg

SEQ ID NO: 5961 - DNA, 22 bp, Mus sp.
  misc_feature 1..22: note = Description of Unknown:MG29-1-mouse ANGPTL3-target site-A2 sequence
  misc_feature 1..22: note = Category: DNA Sequence of ANGPTL3 Target Site
  source 1..22: mol_type = genomic DNA
gcgaatggcctcctgcagctgg

SEQ ID NO: 5962 - DNA, 22 bp, Mus sp.
  misc_feature 1..22: note = Description of Unknown:MG29-1-mouse ANGPTL3-target site-B2 sequence
  misc_feature 1..22: note = Category: DNA Sequence of ANGPTL3 Target Site
  source 1..22: mol_type = genomic DNA
gtccataagactaagggacaaa

SEQ ID NO: 5963 - DNA, 22 bp, Mus sp.
  misc_feature 1..22: note = Description of Unknown:MG29-1-mouse ANGPTL3-target site-C2 sequence
  misc_feature 1..22: note = Category: DNA Sequence of ANGPTL3 Target Site
  source 1..22: mol_type = genomic DNA
tccataagactaagggacaaat

SEQ ID NO: 5964 - DNA, 22 bp, Mus sp.
  misc_feature 1..22: note = Description of Unknown:MG29-1-mouse ANGPTL3-target site-D2 sequence
  misc_feature 1..22: note = Category: DNA Sequence of ANGPTL3 Target Site
  source 1..22: mol_type = genomic DNA
agaagctcaacatatttgatca

SEQ ID NO: 5965 - DNA, 22 bp, Mus sp.
  misc_feature 1..22: note = Description of Unknown:MG29-1-mouse ANGPTL3-target site-E2 sequence
  misc_feature 1..22: note = Category: DNA Sequence of ANGPTL3 Target Site
  source 1..22: mol_type = genomic DNA
atcagtctttttatgacctatc

SEQ ID NO: 5966 - DNA, 22 bp, Mus sp.
  misc_feature 1..22: note = Description of Unknown:MG29-1-mouse ANGPTL3-target site-F2 sequence
  misc_feature 1..22: note = Category: DNA Sequence of ANGPTL3 Target Site
  source 1..22: mol_type = genomic DNA
tatgacctatcacttcgaacca

SEQ ID NO: 5967 - DNA, 22 bp, Mus sp.
  misc_feature 1..22: note = Description of Unknown:MG29-1-mouse ANGPTL3-target site-G2 sequence
  misc_feature 1..22: note = Category: DNA Sequence of ANGPTL3 Target Site
  source 1..22: mol_type = genomic DNA
atgacctatcacttcgaaccaa

SEQ ID NO: 5968 - DNA, 22 bp, Mus sp.
  misc_feature 1..22: note = Description of Unknown:MG29-1-mouse ANGPTL3-target site-H2 sequence
  misc_feature 1..22: note = Category: DNA Sequence of ANGPTL3 Target Site
  source 1..22: mol_type = genomic DNA
tgacctatcacttcgaaccaat

SEQ ID NO: 5969 - DNA, 22 bp, Mus sp.
  misc_feature 1..22: note = Description of Unknown:MG29-1-mouse ANGPTL3-target site-A3 sequence
  misc_feature 1..22: note = Category: DNA Sequence of ANGPTL3 Target Site
  source 1..22: mol_type = genomic DNA
gaggagcagctaaccaacttaa

SEQ ID NO: 5970 - DNA, 22 bp, Mus sp.
  misc_feature 1..22: note = Description of Unknown:MG29-1-mouse ANGPTL3-target site-B3 sequence
  misc_feature 1..22: note = Category: DNA Sequence of ANGPTL3 Target Site
  source 1..22: mol_type = genomic DNA
tacttactttgagtgatgttac

SEQ ID NO: 5971 - DNA, 22 bp, Mus sp.
  misc_feature 1..22: note = Description of Unknown:MG29-1-mouse ANGPTL3-target site-C3 sequence
  misc_feature 1..22: note = Category: DNA Sequence of ANGPTL3 Target Site
  source 1..22: mol_type = genomic DNA
agtgatgttacttctgggtgct

SEQ ID NO: 5972 - DNA, 22 bp, Mus sp.
  misc_feature 1..22: note = Description of Unknown:MG29-1-mouse ANGPTL3-target site-D3 sequence
  misc_feature 1..22: note = Category: DNA Sequence of ANGPTL3 Target Site
  source 1..22: mol_type = genomic DNA
agttcagttctactgacatgtt

SEQ ID NO: 5973 - DNA, 22 bp, Mus sp.
  misc_feature 1..22: note = Description of Unknown:MG29-1-mouse ANGPTL3-target site-E3 sequence
  misc_feature 1..22: note = Category: DNA Sequence of ANGPTL3 Target Site
  source 1..22: mol_type = genomic DNA
taacttgtagtgtagatgtagt

SEQ ID NO: 5974 - DNA, 22 bp, Mus sp.
  misc_feature 1..22: note = Description of Unknown:MG29-1-mouse ANGPTL3-target site-F3 sequence
  misc_feature 1..22: note = Category: DNA Sequence of ANGPTL3 Target Site
  source 1..22: mol_type = genomic DNA
aacttgtagtgtagatgtagtt

SEQ ID NO: 5975 - DNA, 22 bp, Mus sp.
  misc_feature 1..22: note = Description of Unknown:MG29-1-mouse ANGPTL3-target site-G3 sequence
  misc_feature 1..22: note = Category: DNA Sequence of ANGPTL3 Target Site
  source 1..22: mol_type = genomic DNA
acttgtagtgtagatgtagttc

SEQ ID NO: 5976 - DNA, 22 bp, Mus sp.
  misc_feature 1..22: note = Description of Unknown:MG29-1-mouse ANGPTL3-target site-H3 sequence
  misc_feature 1..22: note = Category: DNA Sequence of ANGPTL3 Target Site
  source 1..22: mol_type = genomic DNA
cctcttctttgatttcattggt

SEQ ID NO: 5977 - DNA, 22 bp, Mus sp.
  misc_feature 1..22: note = Description of Unknown:MG29-1-mouse ANGPTL3-target site-A4 sequence
  misc_feature 1..22: note = Category: DNA Sequence of ANGPTL3 Target Site
  source 1..22: mol_type = genomic DNA
ctcttctttgatttcattggtt

SEQ ID NO: 5978 - DNA, 22 bp, Mus sp.
  misc_feature 1..22: note = Description of Unknown:MG29-1-mouse ANGPTL3-target site-B4 sequence
  misc_feature 1..22: note = Category: DNA Sequence of ANGPTL3 Target Site
  source 1..22: mol_type = genomic DNA
atttcattggttcgaagtgata

SEQ ID NO: 5979 - DNA, 22 bp, Mus sp.
  misc_feature 1..22: note = Description of Unknown:MG29-1-mouse ANGPTL3-target site-C4 sequence
  misc_feature 1..22: note = Category: DNA Sequence of ANGPTL3 Target Site
  source 1..22: mol_type = genomic DNA
attggttcgaagtgataggtca

SEQ ID NO: 5980 - DNA, 22 bp, Mus sp.
  misc_feature 1..22: note = Description of Unknown:MG29-1-mouse ANGPTL3-target site-D4 sequence
  misc_feature 1..22: note = Category: DNA Sequence of ANGPTL3 Target Site
  source 1..22: mol_type = genomic DNA
tcccttagtcttatggacaaaa

SEQ ID NO: 5981 - DNA, 22 bp, Mus sp.
  misc_feature 1..22: note = Description of Unknown:MG29-1-mouse ANGPTL3-target site-E4 sequence
  misc_feature 1..22: note = Category: DNA Sequence of ANGPTL3 Target Site
  source 1..22: mol_type = genomic DNA
agtccatgacccagctgcagga

SEQ ID NO: 5982 - DNA, 22 bp, Mus sp.
  misc_feature 1..22: note = Description of Unknown:MG29-1-mouse ANGPTL3-target site-F4 sequence
  misc_feature 1..22: note = Category: DNA Sequence of ANGPTL3 Target Site
  source 1..22: mol_type = genomic DNA
gacatcatccaacatagcaaat

SEQ ID NO: 5983 - DNA, 22 bp, Mus sp.
  misc_feature 1..22: note = Description of Unknown:MG29-1-mouse ANGPTL3-target site-G4 sequence
  misc_feature 1..22: note = Category: DNA Sequence of ANGPTL3 Target Site
  source 1..22: mol_type = genomic DNA
acatcatccaacatagcaaatc

SEQ ID NO: 5984 - DNA, 22 bp, Mus sp.
  misc_feature 1..22: note = Description of Unknown:MG29-1-mouse ANGPTL3-target site-H4 sequence
  misc_feature 1..22: note = Category: DNA Sequence of ANGPTL3 Target Site
  source 1..22: mol_type = genomic DNA
ggctctgaaggtgcagaatcaa

SEQ ID NO: 5985 - DNA, 22 bp, Mus sp.
  misc_feature 1..22: note = Description of Unknown:MG29-1-mouse ANGPTL3-target site-A5 sequence
  misc_feature 1..22: note = Category: DNA Sequence of ANGPTL3 Target Site
  source 1..22: mol_type = genomic DNA
gctctgaaggtgcagaatcaaa

SEQ ID NO: 5986 - DNA, 22 bp, Mus sp.
  misc_feature 1..22: note = Description of Unknown:MG29-1-mouse ANGPTL3-target site-B5 sequence
  misc_feature 1..22: note = Category: DNA Sequence of ANGPTL3 Target Site
  source 1..22: mol_type = genomic DNA
gtagaacagcaagacaacagca

SEQ ID NO: 5987 - DNA, 22 bp, Mus sp.
  misc_feature 1..22: note = Description of Unknown:MG29-1-mouse ANGPTL3-target site-C5 sequence
  misc_feature 1..22: note = Category: DNA Sequence of ANGPTL3 Target Site
  source 1..22: mol_type = genomic DNA
tagaacagcaagacaacagcat

SEQ ID NO: 5988 - DNA, 22 bp, Mus sp.
  misc_feature 1..22: note = Description of Unknown:MG29-1-mouse ANGPTL3-target site-D5 sequence
  misc_feature 1..22: note = Category: DNA Sequence of ANGPTL3 Target Site
  source 1..22: mol_type = genomic DNA
ctatttcttttatctgcatgtg

SEQ ID NO: 5989 - DNA, 22 bp, Mus sp.
  misc_feature 1..22: note = Description of Unknown:MG29-1-mouse ANGPTL3-target site-E5 sequence
  misc_feature 1..22: note = Category: DNA Sequence of ANGPTL3 Target Site
  source 1..22: mol_type = genomic DNA
tatttcttttatctgcatgtgc

SEQ ID NO: 5990 - DNA, 22 bp, Mus sp.
  misc_feature 1..22: note = Description of Unknown:MG29-1-mouse ANGPTL3-target site-F5 sequence
  misc_feature 1..22: note = Category: DNA Sequence of ANGPTL3 Target Site
  source 1..22: mol_type = genomic DNA
ttttatctgcatgtgctgttga

SEQ ID NO: 5991 - DNA, 22 bp, Mus sp.
  misc_feature 1..22: note = Description of Unknown:MG29-1-mouse ANGPTL3-target site-G5 sequence
  misc_feature 1..22: note = Category: DNA Sequence of ANGPTL3 Target Site
  source 1..22: mol_type = genomic DNA
atctgcatgtgctgttgactta

SEQ ID NO: 5992 - DNA, 22 bp, Mus sp.
  misc_feature 1..22: note = Description of Unknown:MG29-1-mouse ANGPTL3-target site-H5 sequence
  misc_feature 1..22: note = Category: DNA Sequence of ANGPTL3 Target Site
  source 1..22: mol_type = genomic DNA
tctgcatgtgctgttgacttaa

SEQ ID NO: 5993 - DNA, 22 bp, Mus sp.
  misc_feature 1..22: note = Description of Unknown:MG29-1-mouse ANGPTL3-target site-A6 sequence
  misc_feature 1..22: note = Category: DNA Sequence of ANGPTL3 Target Site
  source 1..22: mol_type = genomic DNA
tactgttcttccacactctgga

SEQ ID NO: 5994 - DNA, 22 bp, Mus sp.
  misc_feature 1..22: note = Description of Unknown:MG29-1-mouse ANGPTL3-target site-B6 sequence
  misc_feature 1..22: note = Category: DNA Sequence of ANGPTL3 Target Site
  source 1..22: mol_type = genomic DNA
tattcttttatcagctcagaaa

SEQ ID NO: 5995 - DNA, 22 bp, Mus sp.
  misc_feature 1..22: note = Description of Unknown:MG29-1-mouse ANGPTL3-target site-C6 sequence
  misc_feature 1..22: note = Category: DNA Sequence of ANGPTL3 Target Site
  source 1..22: mol_type = genomic DNA
atcagctcagaaagactggtat

SEQ ID NO: 5996 - DNA, 22 bp, Mus sp.
  misc_feature 1..22: note = Description of Unknown:MG29-1-mouse ANGPTL3-target site-D6 sequence
  misc_feature 1..22: note = Category: DNA Sequence of ANGPTL3 Target Site
  source 1..22: mol_type = genomic DNA
tcagctcagaaagactggtatt

SEQ ID NO: 5997 - DNA, 22 bp, Mus sp.
  misc_feature 1..22: note = Description of Unknown:MG29-1-mouse ANGPTL3-target site-E6 sequence
  misc_feature 1..22: note = Category: DNA Sequence of ANGPTL3 Target Site
  source 1..22: mol_type = genomic DNA
ttctaaatcaagagcaccaaga

SEQ ID NO: 5998 - DNA, 22 bp, Mus sp.
  misc_feature 1..22: note = Description of Unknown:MG29-1-mouse ANGPTL3-target site-F6 sequence
  misc_feature 1..22: note = Category: DNA Sequence of ANGPTL3 Target Site
  source 1..22: mol_type = genomic DNA
ctgtttcgttcagttgaagagg

SEQ ID NO: 5999 - DNA, 22 bp, Mus sp.
  misc_feature 1..22: note = Description of Unknown:MG29-1-mouse ANGPTL3-target site-G6 sequence
  misc_feature 1..22: note = Category: DNA Sequence of ANGPTL3 Target Site
  source 1..22: mol_type = genomic DNA
tgtttcgttcagttgaagaggg

SEQ ID NO: 6000 - DNA, 22 bp, Mus sp.
  misc_feature 1..22: note = Description of Unknown:MG29-1-mouse ANGPTL3-target site-H6 sequence
  misc_feature 1..22: note = Category: DNA Sequence of ANGPTL3 Target Site
  source 1..22: mol_type = genomic DNA
gttcagttgaagagggggagta

SEQ ID NO: 6001 - DNA, 22 bp, Mus sp.
  misc_feature 1..22: note = Description of Unknown:MG29-1-mouse ANGPTL3-target site-A7 sequence
  misc_feature 1..22: note = Category: DNA Sequence of ANGPTL3 Target Site
  source 1..22: mol_type = genomic DNA
gaagaaagagaattttctgagg

SEQ ID NO: 6002 - DNA, 22 bp, Mus sp.
  misc_feature 1..22: note = Description of Unknown:MG29-1-mouse ANGPTL3-target site-B7 sequence
  misc_feature 1..22: note = Category: DNA Sequence of ANGPTL3 Target Site
  source 1..22: mol_type = genomic DNA
ctgagggttcttgaataccagt

SEQ ID NO: 6003 - DNA, 22 bp, Mus sp.
  misc_feature 1..22: note = Description of Unknown:MG29-1-mouse ANGPTL3-target site-C7 sequence
  misc_feature 1..22: note = Category: DNA Sequence of ANGPTL3 Target Site
  source 1..22: mol_type = genomic DNA
tgagggttcttgaataccagtc

SEQ ID NO: 6004 - DNA, 22 bp, Mus sp.
  misc_feature 1..22: note = Description of Unknown:MG29-1-mouse ANGPTL3-target site-D7 sequence
  misc_feature 1..22: note = Category: DNA Sequence of ANGPTL3 Target Site
  source 1..22: mol_type = genomic DNA
taacagaggcgaacatacaagt

SEQ ID NO: 6005 - DNA, 22 bp, Mus sp.
  misc_feature 1..22: note = Description of Unknown:MG29-1-mouse ANGPTL3-target site-E7 sequence
  misc_feature 1..22: note = Category: DNA Sequence of ANGPTL3 Target Site
  source 1..22: mol_type = genomic DNA
atgtctactgtgatacccaatc

SEQ ID NO: 6006 - DNA, 22 bp, Mus sp.
  misc_feature 1..22: note = Description of Unknown:MG29-1-mouse ANGPTL3-target site-F7 sequence
  misc_feature 1..22: note = Category: DNA Sequence of ANGPTL3 Target Site
  source 1..22: mol_type = genomic DNA
catgggtttacctgattgggta

SEQ ID NO: 6007 - DNA, 22 bp, Mus sp.
  misc_feature 1..22: note = Description of Unknown:MG29-1-mouse ANGPTL3-target site-G7 sequence
  misc_feature 1..22: note = Category: DNA Sequence of ANGPTL3 Target Site
  source 1..22: mol_type = genomic DNA
cctgattgggtatcacagtaga

SEQ ID NO: 6008 - DNA, 22 bp, Mus sp.
  misc_feature 1..22: note = Description of Unknown:MG29-1-mouse ANGPTL3-target site-H7 sequence
  misc_feature 1..22: note = Category: DNA Sequence of ANGPTL3 Target Site
  source 1..22: mol_type = genomic DNA
ttggtttaatagtgtacacgcc

SEQ ID NO: 6009 - DNA, 22 bp, Mus sp.
  misc_feature 1..22: note = Description of Unknown:MG29-1-mouse ANGPTL3-target site-A8 sequence
  misc_feature 1..22: note = Category: DNA Sequence of ANGPTL3 Target Site
  source 1..22: mol_type = genomic DNA
atagtgtacacgccacttgtat

SEQ ID NO: 6010 - DNA, 22 bp, Mus sp.
  misc_feature 1..22: note = Description of Unknown:MG29-1-mouse ANGPTL3-target site-B8 sequence
  misc_feature 1..22: note = Category: DNA Sequence of ANGPTL3 Target Site
  source 1..22: mol_type = genomic DNA
ccatcgagcctcccaaagccct

SEQ ID NO: 6011 - DNA, 22 bp, Mus sp.
  misc_feature 1..22: note = Description of Unknown:MG29-1-mouse ANGPTL3-target site-C8 sequence
  misc_feature 1..22: note = Category: DNA Sequence of ANGPTL3 Target Site
  source 1..22: mol_type = genomic DNA
cgtagttttcccatgtttcgtt

SEQ ID NO: 6012 - DNA, 22 bp, Mus sp.
  misc_feature 1..22: note = Description of Unknown:MG29-1-mouse ANGPTL3-target site-D8 sequence
  misc_feature 1..22: note = Category: DNA Sequence of ANGPTL3 Target Site
  source 1..22: mol_type = genomic DNA
gtagttttcccatgtttcgttg

SEQ ID NO: 6013 - DNA, 22 bp, Mus sp.
  misc_feature 1..22: note = Description of Unknown:MG29-1-mouse ANGPTL3-target site-E8 sequence
  misc_feature 1..22: note = Category: DNA Sequence of ANGPTL3 Target Site
  source 1..22: mol_type = genomic DNA
cccatgtttcgttgaagtcctg

SEQ ID NO: 6014 - DNA, 22 bp, Mus sp.
  misc_feature 1..22: note = Description of Unknown:MG29-1-mouse ANGPTL3-target site-F8 sequence
  misc_feature 1..22: note = Category: DNA Sequence of ANGPTL3 Target Site
  source 1..22: mol_type = genomic DNA
ccatgtttcgttgaagtcctgt

SEQ ID NO: 6015 - DNA, 22 bp, Mus sp.
  misc_feature 1..22: note = Description of Unknown:MG29-1-mouse ANGPTL3-target site-G8 sequence
  misc_feature 1..22: note = Category: DNA Sequence of ANGPTL3 Target Site
  source 1..22: mol_type = genomic DNA
gttgaagtcctgtgagccatct

SEQ ID NO: 6016 - DNA, 22 bp, Mus sp.
  misc_feature 1..22: note = Description of Unknown:MG29-1-mouse ANGPTL3-target site-H8 sequence
  misc_feature 1..22: note = Category: DNA Sequence of ANGPTL3 Target Site
  source 1..22: mol_type = genomic DNA
cggtgttgaattaatgtccatg

SEQ ID NO: 6017 - DNA, 22 bp, Mus sp.
  misc_feature 1..22: note = Description of Unknown:MG29-1-mouse ANGPTL3-target site-A9 sequence
  misc_feature 1..22: note = Category: DNA Sequence of ANGPTL3 Target Site
  source 1..22: mol_type = genomic DNA
ccctctaacttttttctttagg

SEQ ID NO: 6018 - DNA, 22 bp, Mus sp.
  misc_feature 1..22: note = Description of Unknown:MG29-1-mouse ANGPTL3-target site-B9 sequence
  misc_feature 1..22: note = Category: DNA Sequence of ANGPTL3 Target Site
  source 1..22: mol_type = genomic DNA
cctctaacttttttctttagga

SEQ ID NO: 6019 - DNA, 22 bp, Mus sp.
  misc_feature 1..22: note = Description of Unknown:MG29-1-mouse ANGPTL3-target site-C9 sequence
  misc_feature 1..22: note = Category: DNA Sequence of ANGPTL3 Target Site
  source 1..22: mol_type = genomic DNA
ttctttaggagaattttggttg

SEQ ID NO: 6020 - DNA, 22 bp, Mus sp.
  misc_feature 1..22: note = Description of Unknown:MG29-1-mouse ANGPTL3-target site-D9 sequence
  misc_feature 1..22: note = Category: DNA Sequence of ANGPTL3 Target Site
  source 1..22: mol_type = genomic DNA
tctttaggagaattttggttgg

SEQ ID NO: 6021 - DNA, 22 bp, Mus sp.
  misc_feature 1..22: note = Description of Unknown:MG29-1-mouse ANGPTL3-target site-E9 sequence
  misc_feature 1..22: note = Category: DNA Sequence of ANGPTL3 Target Site
  source 1..22: mol_type = genomic DNA
ctttaggagaattttggttggg

SEQ ID NO: 6022 - DNA, 22 bp, Mus sp.
  misc_feature 1..22: note = Description of Unknown:MG29-1-mouse ANGPTL3-target site-F9 sequence
  misc_feature 1..22: note = Category: DNA Sequence of ANGPTL3 Target Site
  source 1..22: mol_type = genomic DNA
tttaggagaattttggttgggc

SEQ ID NO: 6023 - DNA, 22 bp, Mus sp.
  misc_feature 1..22: note = Description of Unknown:MG29-1-mouse ANGPTL3-target site-G9 sequence
  misc_feature 1..22: note = Category: DNA Sequence of ANGPTL3 Target Site
  source 1..22: mol_type = genomic DNA
ggagaattttggttgggcctag

SEQ ID NO: 6024 - DNA, 22 bp, Mus sp.
  misc_feature 1..22: note = Description of Unknown:MG29-1-mouse ANGPTL3-target site-H9 sequence
  misc_feature 1..22: note = Category: DNA Sequence of ANGPTL3 Target Site
  source 1..22: mol_type = genomic DNA
ggttgggcctagagaagatcta

SEQ ID NO: 6025 - DNA, 22 bp, Mus sp.
  misc_feature 1..22: note = Description of Unknown:MG29-1-mouse ANGPTL3-target site-A10 sequence
  misc_feature 1..22: note = Category: DNA Sequence of ANGPTL3 Target Site
  source 1..22: mol_type = genomic DNA
gttgggcctagagaagatctat

SEQ ID NO: 6026 - DNA, 22 bp, Mus sp.
  misc_feature 1..22: note = Description of Unknown:MG29-1-mouse ANGPTL3-target site-B10 sequence
  misc_feature 1..22: note = Category: DNA Sequence of ANGPTL3 Target Site
  source 1..22: mol_type = genomic DNA
acgactcgagctacaagactgg

SEQ ID NO: 6027 - DNA, 22 bp, Mus sp.
  misc_feature 1..22: note = Description of Unknown:MG29-1-mouse ANGPTL3-target site-C10 sequence
  misc_feature 1..22: note = Category: DNA Sequence of ANGPTL3 Target Site
  source 1..22: mol_type = genomic DNA
cgactcgagctacaagactgga

SEQ ID NO: 6028 - DNA, 22 bp, Mus sp.
  misc_feature 1..22: note = Description of Unknown:MG29-1-mouse ANGPTL3-target site-D10 sequence
  misc_feature 1..22: note = Category: DNA Sequence of ANGPTL3 Target Site
  source 1..22: mol_type = genomic DNA
acctgggcagtcacgaaaccaa

SEQ ID NO: 6029 - DNA, 22 bp, Mus sp.
  misc_feature 1..22: note = Description of Unknown:MG29-1-mouse ANGPTL3-target site-E10 sequence
  misc_feature 1..22: note = Category: DNA Sequence of ANGPTL3 Target Site
  source 1..22: mol_type = genomic DNA
gtgactgcccaggtgaaaggag

SEQ ID NO: 6030 - DNA, 22 bp, Mus sp.
  misc_feature 1..22: note = Description of Unknown:MG29-1-mouse ANGPTL3-target site-F10 sequence
  misc_feature 1..22: note = Category: DNA Sequence of ANGPTL3 Target Site
  source 1..22: mol_type = genomic DNA
cagtcttgtagctcgagtcgta

SEQ ID NO: 6031 - RNA, 133 nt, synthetic construct
  source 1..133: mol_type = other RNA; note = MG55 active effector sgRNA
aaatatttcattaagtaccgaatttaaaaaataggattgcagaaagtgcaattaggctggttgtgcagccttaatctgagggattaatccactcggaaagtacctttattgaaaaatgaaaggtattcacaac

SEQ ID NO: 6032 - skipped

SEQ ID NO: 6033 - RNA, 198 nt, unidentified
  misc_feature 1..198: note = Category: MG91 active effector sgRNA
  misc_feature 1..198: note = Description: MG91-15 sgRNA1
  source 1..198: mol_type = other RNA; note = uncultivated organism sequence
tagagaaaattatatattaggttttgttaagcctaacaatcgttaagtgttctttggaatattgattgtaaatctattttgggaaatgaaaaggcaaaaattacagttatcaattaattgagaagagtatagagtcagttttatagtaccaaaatataccttaattctttaagaaattaaatttaaggtaataacaag

SEQ ID NO: 6034 - RNA, 191 nt, unidentified
  misc_feature 1..191: note = Category: MG91 active effector sgRNA
  misc_feature 1..191: note = Description: MG91-32 sgRNA1
  source 1..191: mol_type = other RNA; note = uncultivated organism sequence
tgcacatcgggtatgtgtggggtcgagtaaggccgacgttgtccgctacaacttagccgtcgggcggttgggcaaccgatcggaagcggaacctggaataaggccaggcagcggcactgccgtcaagcgggaatgaagtccagtagtacgtaaccagtaacttacaaagaaatttgtaaggtacttacagg

SEQ ID NO: 6035 - RNA, 231 nt, unidentified
  misc_feature 1..231: note = Category: MG91 active effector sgRNA
  misc_feature 1..231: note = Description: MG91-87 sgRNA1
  source 1..231: mol_type = other RNA; note = uncultivated organism sequence
gaattgatgcttcgtgcatctaaaaatatactgggaattgtattcccgaagtgagcgttaattggcacagtggtgtcattgctcatcaaaagaagaattggaaaaacagcgaacttcatctcgtttcttcacctttggtgcaagcaaaggtaatgaagtgaaggctttttagtacaatctcatacccctaactgtgtgatactatgccctcgaaagaggggtaaatacagg

SEQ ID NO: 6036 - RNA, 200 nt, unidentified
  misc_feature 1..200: note = Category: MG91 active effector sgRNA
  misc_feature 1..200: note = Description: MG91-87 sgRNA2
  source 1..200: mol_type = other RNA; note = uncultivated organism sequence
tgggaattgtattcccgaagtgagcgttaattggcacagtggtgtcattgctcatcaaaagaagaattggaaaaacagcgaacttcatctcgtttcttcacctttggtgcaagcaaaggtaatgaagtgaaggctttttagtacaatctcatacccctaactgtgtgatactatgccctcgaaagaggggtaaatacagg

SEQ ID NO: 6037-6039 - skipped (3 entries)

SEQ ID NO: 6040 - RNA, 203 nt, unidentified
  misc_feature 1..203: note = Category: MG91 intergenic region potentially encoding tracrRNA
  misc_feature 1..203: note = Description: MG91-2 IG2
  source 1..203: mol_type = unassigned RNA; note = uncultivated organism sequence
aaataacatacagaggttttgttaagcctcacaatcttaataaataagtgttctttgaaaatatttagttgattgtaaatctattttgggaaataaaaaaacaaaaattacagttattagttaactaagaagagtatagagttagttttaaagtaccaaaatataccctaaattattgtttttcaaaactttatagaatatat

SEQ ID NO: 6041 - RNA, 648 nt, unidentified
  misc_feature 1..648: note = Category: MG91 intergenic region potentially encoding tracrRNA
  misc_feature 1..648: note = Description: MG91-10 IG1
  source 1..648: mol_type = unassigned RNA; note = uncultivated organism sequence
tatggcgtgtaatcacctgggaatgaaataaaaaggccatgatttgcatactcggagacctgctctatactcccattcccgaaggaactgactgttatttttgcattctaccattctgcataatcgtttgtcgcaccagccgcccactggcattagcttaacgtacgcaaggcctgacaacacctttatgtcgcaaatatacgaattattattgaaagtgcgtacagaattcagaatgaaagtgctatactttaacagtatttatccaaaacgtttaatatcttacacatcaattcatgtttgtaaatcacatttcatttattaatcagacctgtttaacgtagtaacaagaacgaaattactgactttcaatctgccttctatatgatagcagaaaaattctctagagaatttcttcctgtataactaagtagcaaatgctatatcacttagtaaggacaaaattctctagagaatttctttactactctacagctaagaaatgaggaacaacagactgggttttactttataaccgatagagatggaacgggtgagtgtcggaagatgtttaaatcaagattatcgagaaataattggcattctcaggagtatttactaaatttgcacgaaaatacgaaaagcatt

SEQ ID NO: 6042 - RNA, 192 nt, unidentified
  misc_feature 1..192: note = Category: MG91 intergenic region potentially encoding tracrRNA
  misc_feature 1..192: note = Description: MG91-52 IG1
  source 1..192: mol_type = unassigned RNA; note = uncultivated organism sequence
gatataaagaggcattgtcaggcctcgcggacgttaagctaatgccggtgggcggctggtccgacgaattggtgagtggaagaggaatgcgaaaatgacagtcaccctcgtaagagggctgagttatagagtatatccgcgagtacgcaagccgtgactacatactggcattgagccagttagacattatga

SEQ ID NO: 6043 - RNA, 428 nt, unidentified
  misc_feature 1..428: note = Category: MG91 intergenic region potentially encoding tracrRNA
  misc_feature 1..428: note = Description: MG91-61 IG2
  source 1..428: mol_type = unassigned RNA; note = uncultivated organism sequence
taattaaggttgtgatctttatgattgagattgcaacctttttttaaaaaaatatgcaacaaaacgccccaaaacgcatcatttaggggtgttagggtcttgaatttgttaaatcaagacttttattttgaatattttggctccacaagggaattttcgcaattttgcactgcacaccagcaatggcgtgtgggggcttgtaggcccgacgcatcctcgctttaaaactcagccatcgggcggttatggggagctgaacggaaacggaaatgggaataagacaatgcagcgcaagcagagcgtggatgaagtctcagagtacgcgaccattgacttgcaaaaagtgatctttgaccaactgaagggtgtaatacacaccgctgtaaggcaaatacaggctgcagactggccatcccagaatacaataa

SEQ ID NO: 6044 - RNA, 192 nt, unidentified
  misc_feature 1..192: note = Category: MG91 intergenic region potentially encoding tracrRNA
  misc_feature 1..192: note = Description: MG91-69 IG2
  source 1..192: mol_type = unassigned RNA; note = uncultivated organism sequence
taaaaaaagatattaggttttgttaagcctaacaatcgttaagtgttctttggaatattgattgtaaatctattttgggaaataaaaaagcaaaaattacagttatcagtttactgagaagagtatagagttagttttaaagtaccaaaatataccctaaattattgtttttcaaaactttatagaatatat

SEQ ID NO: 6045 - RNA, 345 nt, unidentified
  misc_feature 1..345: note = Category: MG91 intergenic region potentially encoding tracrRNA
  misc_feature 1..345: note = Description: MG91-94 IG1
  source 1..345: mol_type = unassigned RNA; note = uncultivated organism sequence
ccgtagtgcataatcacctgagaatgaatgaaaaaggccatgatatgcatacttggggacttgctctatactcccattcccgaaggaattgactgttatttttgcattccaccattctgcaaatcgtttgtcgcaccagccgcccactggcattaagcttaacgtgcgcaaggcctgacaacacctttatgggtgcaaagatactaaaagttttcaaaagaagatagggaaaagagaaaaaacttcaaatccattttggcgttgcagcgttgcagtgttgcagttccaaaatagattctgcgatagtcaaaaaataactctatatttaataaatatagaagtatt

SEQ ID NO: 6046 - RNA, 448 nt, unidentified
  misc_feature 1..448: note = Category: MG91 intergenic region potentially encoding tracrRNA
  misc_feature 1..448: note = Description: MG91-101 IG2
  source 1..448: mol_type = unassigned RNA; note = uncultivated organism sequence
ttcaggaattcaaagatcaccttttttgcaagttactggtcacgtactactggacttcattcctgcttgacggcagtgccgctgcatggccttattccaggttccgcttccgattggctgcccaaccgcccgacggctaagttgtagcggacagcgttggccctacaagaccccacacattcccgatgtgcattgcaaagttcgggaatgatatcgagaaaggcaaaatctggcaaaactttgtcttgatttaacacatttatgatttttccggcgaaaaaatggtcgcgaaaaatgtcatccaggatatatgaagactccagcggaaaaaggtttaacgccgttgtaaacttagttttctttggagtaaacagggtaacctcttgtggaaattcggacaggatgagtgttgattgctttatccggatgttattttgctatagtattt

SEQ ID NO: 6047 - RNA, 196 nt, unidentified
  misc_feature 1..196: note = Category: MG91 intergenic region potentially encoding tracrRNA
  misc_feature 1..196: note = Description: MG91-107 IG2
  source 1..196: mol_type = unassigned RNA; note = uncultivated organism sequence
gtataaacactattggactgtgacaaataaagttaggataggatgttcttactttaaatagtatttgctatcgttcaaaaaggcaagatagccatttttacatgataacattctgctttatttcatcacatctttgttttagcaatggcaattgtttgccattaacgctaagattggattacaaatccatatttct

SEQ ID NO: 6048 - DNA, 316 bp, unidentified
  misc_feature 1..316: note = Category: MG91 intergenic region potentially encoding tracrRNA
  misc_feature 1..316: note = Description: MG91-155 IG1
  source 1..316: mol_type = unassigned DNA; note = uncultivated organism sequence
cctatggttggtaatcacctaggaatgaataaaaagactatgataagcatactcggggacttgctctatactcccgttctcgaaggaactgactgttatttttgcattccaccattctgcaaatcgtttgtcggaccagccgcccactggcattagcttgacgtccgcaaggcctaacaacgcctttcttttgcaaatatacggatttatatttctttcacaaaattaatgaggaactttttcatattccttttgtccatctgttactgccacatgatttttcgtaggaaagaccttggaggcggatggattgaaa

SEQ ID NO: 6049 - RNA, 205 nt, unidentified
  misc_feature 1..205: note = Category: MG91 intergenic region potentially encoding tracrRNA
  misc_feature 1..205: note = Description: MG91-201 IG2
  source 1..205: mol_type = unassigned RNA; note = uncultivated organism sequence
atatattctataaagttttgaaaaacaataatttagggtatattttggtactttaaaactaactctatactcttcttagttaactaataactgtaatttttgtttttttatttcccaaaatagatttacaatcaactaaatatttcaaagaacacttaattattaagattgtgaggcttaacaaaacctctgtatgttatttttt

SEQ ID NO: 6050 - DNA, 36 bp, unidentified
  misc_feature 1..36: note = Category: MG91 CRISPR repeat
  misc_feature 1..36: note = Description: MG91-2 Repeat
  source 1..36: mol_type = unassigned DNA; note = uncultivated organism sequence
ggtagatatacctattaaagttagggtactaacaag

SEQ ID NO: 6051 - DNA, 36 bp, unidentified
  misc_feature 1..36: note = Category: MG91 CRISPR repeat
  misc_feature 1..36: note = Description: MG91-10 Repeat
  source 1..36: mol_type = unassigned DNA; note = uncultivated organism sequence
ggtgttaatcacccggaaatgtaggctattgacagg

SEQ ID NO: 6052 - DNA, 36 bp, unidentified
  misc_feature 1..36: note = Category: MG91 CRISPR repeat
  misc_feature 1..36: note = Description: MG91-52 Repeat
  source 1..36: mol_type = unassigned DNA; note = uncultivated organism sequence
ggtgtaagacacctggaaatgtaaggcattgacagg

SEQ ID NO: 6053 - DNA, 36 bp, unidentified
  misc_feature 1..36: note = Category: MG91 CRISPR repeat
  misc_feature 1..36: note = Description: MG91-61 Repeat
  source 1..36: mol_type = unassigned DNA; note = uncultivated organism sequence
cctgtatttggcttacaaattaggatgattaacacc

SEQ ID NO: 6054 - DNA, 36 bp, unidentified
  misc_feature 1..36: note = Category: MG91 CRISPR repeat
  misc_feature 1..36: note = Description: MG91-69 Repeat
  source 1..36: mol_type = unassigned DNA; note = uncultivated organism sequence
ggtgtatatacctaataaagttagggtactaacaag

SEQ ID NO: 6055 - DNA, 37 bp, unidentified
  misc_feature 1..37: note = Category: MG91 CRISPR repeat
  misc_feature 1..37: note = Description: MG91-94 Repeat
  source 1..37: mol_type = unassigned DNA; note = uncultivated organism sequence
ggtgttaatcacccgaaaatgtaggtcattgacagga

SEQ ID NO: 6056 - DNA, 37 bp, unidentified
  misc_feature 1..37: note = Category: MG91 CRISPR repeat
  misc_feature 1..37: note = Description: MG91-101 Repeat
  source 1..37: mol_type = unassigned DNA; note = uncultivated organism sequence
gggtgttacacacccgaatttgcaaggtacttacagg

SEQ ID NO: 6057 - DNA, 36 bp, unidentified
  misc_feature 1..36: note = Category: MG91 CRISPR repeat
  misc_feature 1..36: note = Description: MG91-107 Repeat
  source 1..36: mol_type = unassigned DNA; note = uncultivated organism sequence
cctgtatgtgactttgaaatatagggtagttacaag

SEQ ID NO: 6058 - DNA, 36 bp, unidentified
  misc_feature 1..36: note = Category: MG91 CRISPR repeat
  misc_feature 1..36: note = Description: MG91-155 Repeat
  source 1..36: mol_type = unassigned DNA; note = uncultivated organism sequence
ggtgttaatcacccagaaatgtagactattaacagg

SEQ ID NO: 6059 - DNA, 38 bp, unidentified
  misc_feature 1..38: note = Category: MG91 CRISPR repeat
  misc_feature 1..38: note = Description: MG91-201 Repeat
  source 1..38: mol_type = unassigned DNA; note = uncultivated organism sequence
gctgtatatgcctaataaagttagggtactaacaagaa

SEQ ID NO: 6060 - RNA, 42 nt, synthetic construct
  source 1..42: mol_type = other RNA
taatttctactgttgtagattcaacatggcagtggcaggcct

SEQ ID NO: 6061 - RNA, 42 nt, synthetic construct
  source 1..42: mol_type = other RNA
taatttctactgttgtagatggctctggacgccacactatct

SEQ ID NO: 6062 - RNA, 42 nt, synthetic construct
  source 1..42: mol_type = other RNA
taatttctactgttgtagattgaaggatttctccaaactcct

SEQ ID NO: 6063 - RNA, 42 nt, synthetic construct
  source 1..42: mol_type = other RNA
taatttctactgttgtagattccaaactcctggccttctcca

SEQ ID NO: 6064 - RNA, 42 nt, synthetic construct
  source 1..42: mol_type = other RNA
taatttctactgttgtagattgacaccacttctctaccgcta

SEQ ID NO: 6065 - RNA, 42 nt, synthetic construct
  source 1..42: mol_type = other RNA
taatttctactgttgtagattcatcagccgttggagcttgct

SEQ ID NO: 6066 - RNA, 42 nt, synthetic construct
  source 1..42: mol_type = other RNA
taatttctactgttgtagatcatcagccgttggagcttgctg

SEQ ID NO: 6067 - RNA, 42 nt, synthetic construct
  source 1..42: mol_type = other RNA
taatttctactgttgtagatatcagccgttggagcttgctgg

SEQ ID NO: 6068 - RNA, 42 nt, synthetic construct
  source 1..42: mol_type = other RNA
taatttctactgttgtagatgagaaatccttcacaaagtgca

SEQ ID NO: 6069 - DNA, 22 bp, Homo sapiens
  source 1..22: mol_type = genomic DNA
tcaacatggcagtggcaggcct

SEQ ID NO: 6070 - DNA, 22 bp, Homo sapiens
  source 1..22: mol_type = genomic DNA
ggctctggacgccacactatct

SEQ ID NO: 6071 - DNA, 22 bp, Homo sapiens
  source 1..22: mol_type = genomic DNA
tgaaggatttctccaaactcct

SEQ ID NO: 6072 - DNA, 22 bp, Homo sapiens
  source 1..22: mol_type = genomic DNA
tccaaactcctggccttctcca

SEQ ID NO: 6073 - DNA, 22 bp, Homo sapiens
  source 1..22: mol_type = genomic DNA
tgacaccacttctctaccgcta

SEQ ID NO: 6074 - DNA, 22 bp, Homo sapiens
  source 1..22: mol_type = genomic DNA
tcatcagccgttggagcttgct

SEQ ID NO: 6075 - DNA, 22 bp, Homo sapiens
  source 1..22: mol_type = genomic DNA
catcagccgttggagcttgctg

SEQ ID NO: 6076 - DNA, 22 bp, Homo sapiens
  source 1..22: mol_type = genomic DNA
atcagccgttggagcttgctgg

SEQ ID NO: 6077 - DNA, 22 bp, Homo sapiens
  source 1..22: mol_type = genomic DNA
gagaaatccttcacaaagtgca

SEQ ID NO: 6078 - RNA, 42 nt, synthetic construct
  source 1..42: mol_type = other RNA
taatttctactgttgtagatgcctctggacaccttactactt

SEQ ID NO: 6079 - RNA, 42 nt, synthetic construct
  source 1..42: mol_type = other RNA
taatttctactgttgtagatttgatgtaacggtagagcagtg

SEQ ID NO: 6080 - DNA, 22 bp, Mus sp.
  source 1..22: mol_type = genomic DNA
gcctctggacaccttactactt

SEQ ID NO: 6081 - DNA, 22 bp, Mus sp.
  source 1..22: mol_type = genomic DNA
ttgatgtaacggtagagcagtg

SEQ ID NO: 6082 - RNA, 42 nt, synthetic construct
  source 1..42: mol_type = other RNA
taatttctactgttgtagattattgttcctctagttatttcc

SEQ ID NO: 6083 - RNA, 42 nt, synthetic construct
  source 1..42: mol_type = other RNA
taatttctactgttgtagatattgttcctctagttatttcct

SEQ ID NO: 6084 - RNA, 42 nt, synthetic construct
  source 1..42: mol_type = other RNA
taatttctactgttgtagatttgttcctctagttatttcctc

SEQ ID NO: 6085 - RNA, 42 nt, synthetic construct
  source 1..42: mol_type = other RNA
taatttctactgttgtagatctccagaattgatcaagacaat

SEQ ID NO: 6086 - RNA, 42 nt, synthetic construct
  source 1..42: mol_type = other RNA
taatttctactgttgtagatattctctatctccagagccaaa

SEQ ID NO: 6087 - RNA, 42 nt, synthetic construct
  source 1..42: mol_type = other RNA
taatttctactgttgtagatagccaatggcctccttcagttg

SEQ ID NO: 6088 - RNA, 42 nt, synthetic construct
  source 1..42: mol_type = other RNA
taatttctactgttgtagatgccaatggcctccttcagttgg

SEQ ID NO: 6089 - RNA, 42 nt, synthetic construct
  source 1..42: mol_type = other RNA
taatttctactgttgtagattccataagacgaagggccaaat

SEQ ID NO: 6090 - RNA, 42 nt, synthetic construct
  source 1..42: mol_type = other RNA
taatttctactgttgtagataaaaactcaacatatttgatca

SEQ ID NO: 6091 - RNA, 42 nt, synthetic construct
  source 1..42: mol_type = other RNA
taatttctactgttgtagatatcagtctttttatgatctatc

SEQ ID NO: 6092 - RNA, 42 nt, synthetic construct
  source 1..42: mol_type = other RNA
taatttctactgttgtagattatgatctatcgctgcaaacca

SEQ ID NO: 6093 - RNA, 42 nt, synthetic construct
  source 1..42: mol_type = other RNA
taatttctactgttgtagatatgatctatcgctgcaaaccag

SEQ ID NO: 6094 - RNA, 42 nt, synthetic construct
  source 1..42: mol_type = other RNA
taatttctactgttgtagattgatctatcgctgcaaaccagt

SEQ ID NO: 6095 - RNA, 42 nt, synthetic construct
  source 1..42: mol_type = other RNA
taatttctactgttgtagatgaagagcaactaactaacttaa

SEQ ID NO: 6096 - RNA, 42 nt, synthetic construct
  source 1..42: mol_type = other RNA
taatttctactgttgtagatagtgaagttacttctgggtgtt

SEQ ID NO: 6097 - RNA, 42 nt, synthetic construct
  source 1..42: mol_type = other RNA
taatttctactgttgtagatgaattaagttagttagttgctc

SEQ ID NO: 6098 - RNA, 42 nt, synthetic construct
  source 1..42: mol_type = other RNA
taatttctactgttgtagatttcttctaggaggctttcaagt

SEQ ID NO: 6099 - RNA, 42 nt, synthetic construct
  source 1..42: mol_type = other RNA
taatttctactgttgtagattcttctaggaggctttcaagtt

SEQ ID NO: 6100 - RNA, 42 nt, synthetic construct
  source 1..42: mol_type = other RNA
taatttctactgttgtagatcttctaggaggctttcaagttt

SEQ ID NO: 6101 - RNA, 42 nt, synthetic construct
  source 1..42: mol_type = other RNA
taatttctactgttgtagatttctaggaggctttcaagtttt

SEQ ID NO: 6102 - RNA, 42 nt, synthetic construct
  source 1..42: mol_type = other RNA
taatttctactgttgtagataagttttgagttgagttcaagt

SEQ ID NO: 6103 - RNA, 42 nt, synthetic construct
  source 1..42: mol_type = other RNA
taatttctactgttgtagatgagttgagttcaagtgacatat

SEQ ID NO: 6104 - RNA, 42 nt, synthetic construct
  source 1..42: mol_type = other RNA
taatttctactgttgtagatagttgagttcaagtgacatatt

SEQ ID NO: 6105 - RNA, 42 nt, synthetic construct
  source 1..42: mol_type = other RNA
taatttctactgttgtagatcctcttcatttttgacttgtag

SEQ ID NO: 6106 - RNA, 42 nt, synthetic construct
  source 1..42: mol_type = other RNA
taatttctactgttgtagattatgtagttcttctcagttcct

SEQ ID NO: 6107 - RNA, 42 nt, synthetic construct
  source 1..42: mol_type = other RNA
taatttctactgttgtagatcttcttctttgatttcactggt

SEQ ID NO: 6108 - RNA, 42 nt, synthetic construct
  source 1..42: mol_type = other RNA
taatttctactgttgtagatttcttctttgatttcactggtt

SEQ ID NO: 6109 - RNA, 42 nt, synthetic construct
  source 1..42: mol_type = other RNA
taatttctactgttgtagatatttcactggtttgcagcgata

SEQ ID NO: 6110 - RNA, 42 nt, synthetic construct
  source 1..42: mol_type = other RNA
taatttctactgttgtagatactggtttgcagcgatagatca

SEQ ID NO: 6111 - RNA, 42 nt, synthetic construct
  source 1..42: mol_type = other RNA
taatttctactgttgtagatcagcgatagatcataaaaagac

SEQ ID NO: 6112 - RNA, 42 nt, synthetic construct
  source 1..42: mol_type = other RNA
taatttctactgttgtagatgaaatatgtcattaatttggcc

SEQ ID NO: 6113 - RNA, 42 nt, synthetic construct
  source 1..42: mol_type = other RNA
taatttctactgttgtagataaatatgtcattaatttggccc

SEQ ID NO: 6114 - RNA, 42 nt, synthetic construct
  source 1..42: mol_type = other RNA
taatttctactgttgtagatgcccttcgtcttatggacaaag

SEQ ID NO: 6115 - RNA, 42 nt, synthetic construct
  source 1..42: mol_type = other RNA
taatttctactgttgtagatagaccatgtcccaactgaagga

SEQ ID NO: 6116 - RNA, 42 nt, synthetic construct
  source 1..42: mol_type = other RNA
taatttctactgttgtagattacatcgtctaacatagcaaat

SEQ ID NO: 6117 - RNA, 42 nt, synthetic construct
  source 1..42: mol_type = other RNA
taatttctactgttgtagatacatcgtctaacatagcaaatc

SEQ ID NO: 6118 - RNA, 42 nt, synthetic construct
  source 1..42: mol_type = other RNA
taatttctactgttgtagatcatcgtctaacatagcaaatct

SEQ ID NO: 6119 - RNA, 42 nt, synthetic construct
  source 1..42: mol_type = other RNA
taatttctactgttgtagatggctctggagatagagaatcaa

SEQ ID NO: 6120 - RNA, 42 nt, synthetic construct
  source 1..42: mol_type = other RNA
taatttctactgttgtagatgctctggagatagagaatcaaa

SEQ ID NO: 6121 - RNA, 42 nt, synthetic construct
  source 1..42: mol_type = other RNA
taatttctactgttgtagatttttatttgactatgctgttgg

SEQ ID NO: 6122 - RNA, 42 nt, synthetic construct
  source 1..42: mol_type = other RNA
taatttctactgttgtagatatttgactatgctgttggttta

SEQ ID NO: 6123 - RNA, 42 nt, synthetic construct
  source 1..42: mol_type = other RNA
taatttctactgttgtagattttgactatgctgttggtttaa

SEQ ID NO: 6124 - RNA, 42 nt, synthetic construct
  source 1..42: mol_type = other RNA
taatttctactgttgtagatactatgctgttggtttaattgt

SEQ ID NO: 6125 - RNA, 42 nt, synthetic construct
  source 1..42: mol_type = other RNA
taatttctactgttgtagatattgtttatattggtcttccac

SEQ ID NO: 6126 - RNA, 42 nt, synthetic construct
  source 1..42: mol_type = other RNA
taatttctactgttgtagattattggtcttccacggtctgga

SEQ ID NO: 6127 - RNA, 42 nt, synthetic construct
  source 1..42: mol_type = other RNA
taatttctactgttgtagattattcttttatcagctcagaag

SEQ ID NO: 6128 - RNA, 42 nt, synthetic construct
  source 1..42: mol_type = other RNA
taatttctactgttgtagatatcagctcagaaggactagtat

SEQ ID NO: 6129 - RNA, 42 nt, synthetic construct
  source 1..42: mol_type = other RNA
taatttctactgttgtagattcagctcagaaggactagtatt

SEQ ID NO: 6130 - RNA, 42 nt, synthetic construct
  source 1..42: mol_type = other RNA
taatttctactgttgtagattctatcttccaagccaagagca

SEQ ID NO: 6131 - RNA, 42 nt, synthetic construct
  source 1..42: mol_type = other RNA
taatttctactgttgtagattgtgggttcttgaatactagtc

SEQ ID NO: 6132 - RNA, 42 nt, synthetic construct
  source 1..42: mol_type = other RNA
taatttctactgttgtagatattgattctaggcattcctgct

SEQ ID NO: 6133 - RNA, 42 nt, synthetic construct
  source 1..42: mol_type = other RNA
taatttctactgttgtagatttgattctaggcattcctgctg

SEQ ID NO: 6134 - RNA, 42 nt, synthetic construct
  source 1..42: mol_type = other RNA
taatttctactgttgtagattaacagaggtgaacatacaagt

SEQ ID NO: 6135 - RNA, 42 nt, synthetic construct
  source 1..42: mol_type = other RNA
taatttctactgttgtagattcatgtctactgtgatgttata

SEQ ID NO: 6136 - RNA, 42 nt, synthetic construct
  source 1..42: mol_type = other RNA
taatttctactgttgtagatcatgtctactgtgatgttatat

SEQ ID NO: 6137 - RNA, 42 nt, synthetic construct
  source 1..42: mol_type = other RNA
taatttctactgttgtagatatgtctactgtgatgttatatc

SEQ ID NO: 6138 - RNA, 42 nt, synthetic construct
  source 1..42: mol_type = other RNA
taatttctactgttgtagatacctgatataacatcacagtag

SEQ ID NO: 6139 - RNA, 42 nt, synthetic construct
  source 1..42: mol_type = other RNA
taatttctactgttgtagatcctgatataacatcacagtaga

SEQ ID NO: 6140 - RNA, 42 nt, synthetic construct
  source 1..42: mol_type = other RNA
taatttctactgttgtagatattcattatattcaggtagtcc

SEQ ID NO: 6141 - RNA, 42 nt, synthetic construct
  source 1..42: mol_type = other RNA
taatttctactgttgtagattagttctcccacgtttcattga

SEQ ID NO: 6142 - RNA, 42 nt, synthetic construct
  source 1..42: mol_type = other RNA
taatttctactgttgtagatattgaagttttgtgatccatct

SEQ ID NO: 6143 - RNA, 42 nt, synthetic construct
  source 1..42: mol_type = other RNA
taatttctactgttgtagatgtgatccatctattcgatgttg

SEQ ID NO: 6144 - RNA, 42 nt, synthetic construct
  source 1..42: mol_type = other RNA
taatttctactgttgtagattgatccatctattcgatgttga

SEQ ID NO: 6145 - RNA, 42 nt, synthetic construct
  source 1..42: mol_type = other RNA
taatttctactgttgtagatcttttcaggagaattttggttg

SEQ ID NO: 6146 - RNA, 42 nt, synthetic construct
  source 1..42: mol_type = other RNA
taatttctactgttgtagatttttcaggagaattttggttgg

SEQ ID NO: 6147 - RNA, 42 nt, synthetic construct
  source 1..42: mol_type = other RNA
taatttctactgttgtagatcaggagaattttggttgggcct

SEQ ID NO: 6148 - RNA, 42 nt, synthetic construct
  source 1..42: mol_type = other RNA
taatttctactgttgtagataggagaattttggttgggccta

SEQ ID NO: 6149 - RNA, 42 nt, synthetic construct
  source 1..42: mol_type = other RNA
taatttctactgttgtagatggttgggcctagagaagatata

SEQ ID NO: 6150 - RNA, 42 nt, synthetic construct
  source 1..42: mol_type = other RNA
taatttctactgttgtagatgttgggcctagagaagatatac

SEQ ID NO: 6151 - RNA, 42 nt, synthetic construct
  source 1..42: mol_type = other RNA
taatttctactgttgtagatacgaattgagttggaagactgg

SEQ ID NO: 6152 - RNA, 42 nt, synthetic construct
  source 1..42: mol_type = other RNA
taatttctactgttgtagatcgaattgagttggaagactgga

SEQ ID NO: 6153 - RNA, 42 nt, synthetic construct
  source 1..42: mol_type = other RNA
taatttctactgttgtagattacttgggaaatcacgaaacca

SEQ ID NO: 6154 - RNA, 42 nt, synthetic construct
  source 1..42: mol_type = other RNA
taatttctactgttgtagatacttgggaaatcacgaaaccaa

SEQ ID NO: 6155 - RNA, 42 nt, synthetic construct
  source 1..42: mol_type = other RNA
taatttctactgttgtagatcttgggaaatcacgaaaccaac

SEQ ID NO: 6156 - RNA, 42 nt, synthetic construct
  source 1..42: mol_type = other RNA
taatttctactgttgtagatgtgttttctacttgggatcaca

SEQ ID NO: 6157 - RNA, 42 nt, synthetic construct
  source 1..42: mol_type = other RNA
taatttctactgttgtagatctacttgggatcacaaagcaaa

SEQ ID NO: 6158 - RNA, 42 nt, synthetic construct
  source 1..42: mol_type = other RNA
taatttctactgttgtagattacttgggatcacaaagcaaaa

SEQ ID NO: 6159 - RNA, 42 nt, synthetic construct
  source 1..42: mol_type = other RNA
taatttctactgttgtagatgctttgtgatcccaagtagaaa

SEQ ID NO: 6160 - RNA, 42 nt, synthetic construct
  source 1..42: mol_type = other RNA
taatttctactgttgtagatctttgtgatcccaagtagaaaa

SEQ ID NO: 6161 - RNA, 42 nt, synthetic construct
  source 1..42: mol_type = other RNA
taatttctactgttgtagattgatcccaagtagaaaacacca

SEQ ID NO: 6162 - RNA, 42 nt, synthetic construct
  source 1..42: mol_type = other RNA
taatttctactgttgtagatttttccgggattgcattgggga

SEQ ID NO: 6163 - RNA, 42 nt, synthetic construct
  source 1..42: mol_type = other RNA
taatttctactgttgtagatccgggattgcattggggacatt

SEQ ID NO: 6164 - RNA, 42 nt, synthetic construct
  source 1..42: mol_type = other RNA
taatttctactgttgtagatcgggattgcattggggacattg

SEQ ID NO: 6165 - RNA, 42 nt, synthetic construct
  source 1..42: mol_type = other RNA
taatttctactgttgtagatgtgatttcccaagtaaaaagaa

SEQ ID NO: 6166 - RNA, 42 nt, synthetic construct
  source 1..42: mol_type = other RNA
taatttctactgttgtagatttgtctttccagtcttccaact

SEQ ID NO: 6167 - RNA, 42 nt, synthetic construct
  source 1..42: mol_type = other RNA
taatttctactgttgtagatcagtcttccaactcaattcgta

SEQ ID NO: 6168 - RNA, 42 nt, synthetic construct
  source 1..42: mol_type = other RNA
taatttctactgttgtagatggaggctggtggtggcatgatg

SEQ ID NO: 6169 - RNA, 42 nt, synthetic construct
  source 1..42: mol_type = other RNA
taatttctactgttgtagataaatttgcctcagttcattcaa

SEQ ID NO: 6170 - RNA, 42 nt, synthetic construct
  source 1..42: mol_type = other RNA
taatttctactgttgtagataatttgcctcagttcattcaaa

SEQ ID NO: 6171 - RNA, 42 nt, synthetic construct
  source 1..42: mol_type = other RNA
taatttctactgttgtagatcctcagttcattcaaagctttc

SEQ ID NO: 6172 - RNA, 42 nt, synthetic construct
  source 1..42: mol_type = other RNA
taatttctactgttgtagattgaatctgttggatggatcaac

SEQ ID NO: 6173 - RNA, 42 nt, synthetic construct
  source 1..42: mol_type = other RNA
taatttctactgttgtagattagagtataaccttccattttg

SEQ ID NO: 6174 - RNA, 42 nt, synthetic construct
  source 1..42: mol_type = other RNA
taatttctactgttgtagatgagacttccaagataatcctct

SEQ ID NO: 6175 - RNA, 42 nt, synthetic construct
  source 1..42: mol_type = other RNA
taatttctactgttgtagatagacttccaagataatcctctt

SEQ ID NO: 6176 - RNA, 42 nt, synthetic construct
  source 1..42: mol_type = other RNA
taatttctactgttgtagatgctcttggtttgttatatttac

SEQ ID NO: 6177 - RNA, 42 nt, synthetic construct
  source 1..42: mol_type = other RNA
taatttctactgttgtagatctcttggtttgttatatttacc

SEQ ID NO: 6178 - DNA, 22 bp, Homo sapiens
  source 1..22: mol_type = genomic DNA
tattgttcctctagttatttcc

SEQ ID NO: 6179 - DNA, 22 bp, Homo sapiens
  source 1..22: mol_type = genomic DNA
attgttcctctagttatttcct

SEQ ID NO: 6180 - DNA, 22 bp, Homo sapiens
  source 1..22: mol_type = genomic DNA
ttgttcctctagttatttcctc

SEQ ID NO: 6181 - DNA, 22 bp, Homo sapiens
  source 1..22: mol_type = genomic DNA
ctccagaattgatcaagacaat

SEQ ID NO: 6182 - DNA, 22 bp, Homo sapiens
  source 1..22: mol_type = genomic DNA
attctctatctccagagccaaa

SEQ ID NO: 6183 - DNA, 22 bp, Homo sapiens
  source 1..22: mol_type = genomic DNA
agccaatggcctccttcagttg

SEQ ID NO: 6184 - DNA, 22 bp, Homo sapiens
  source 1..22: mol_type = genomic DNA
gccaatggcctccttcagttgg

SEQ ID NO: 6185 - DNA, 22 bp, Homo sapiens
  source 1..22: mol_type = genomic DNA
tccataagacgaagggccaaat

SEQ ID NO: 6186 - DNA, 22 bp, Homo sapiens
  source 1..22: mol_type = genomic DNA
aaaaactcaacatatttgatca

SEQ ID NO: 6187 - DNA, 22 bp, Homo sapiens
  source 1..22: mol_type = genomic DNA
atcagtctttttatgatctatc

SEQ ID NO: 6188 - DNA, 22 bp, Homo sapiens
  source 1..22: mol_type = genomic DNA
tatgatctatcgctgcaaacca

SEQ ID NO: 6189 - DNA, 22 bp, Homo sapiens
  source 1..22: mol_type = genomic DNA
atgatctatcgctgcaaaccag

SEQ ID NO: 6190 - DNA, 22 bp, Homo sapiens
  source 1..22: mol_type = genomic DNA
tgatctatcgctgcaaaccagt

SEQ ID NO: 6191 - DNA, 22 bp, Homo sapiens
  source 1..22: mol_type = genomic DNA
gaagagcaactaactaacttaa

SEQ ID NO: 6192 - DNA, 22 bp, Homo sapiens
  source 1..22: mol_type = genomic DNA
agtgaagttacttctgggtgtt

SEQ ID NO: 6193 - DNA, 22 bp, Homo sapiens
  source 1..22: mol_type = genomic DNA
gaattaagttagttagttgctc

SEQ ID NO: 6194 - DNA, 22 bp, Homo sapiens
  source 1..22: mol_type = genomic DNA
ttcttctaggaggctttcaagt

SEQ ID NO: 6195 - DNA, 22 bp, Homo sapiens
  source 1..22: mol_type = genomic DNA
tcttctaggaggctttcaagtt

SEQ ID NO: 6196 - DNA, 22 bp, Homo sapiens
  source 1..22: mol_type = genomic DNA
cttctaggaggctttcaagttt

SEQ ID NO: 6197 - DNA, 22 bp, Homo sapiens
  source 1..22: mol_type = genomic DNA
ttctaggaggctttcaagtttt

SEQ ID NO: 6198 - DNA, 22 bp, Homo sapiens
  source 1..22: mol_type = genomic DNA
aagttttgagttgagttcaagt

SEQ ID NO: 6199 - DNA, 22 bp, Homo sapiens
  source 1..22: mol_type = genomic DNA
gagttgagttcaagtgacatat

SEQ ID NO: 6200 - DNA, 22 bp, Homo sapiens
  source 1..22: mol_type = genomic DNA
agttgagttcaagtgacatatt

SEQ ID NO: 6201 - DNA, 22 bp, Homo sapiens
  source 1..22: mol_type = genomic DNA
cctcttcatttttgacttgtag

SEQ ID NO: 6202 - DNA, 22 bp, Homo sapiens
  source 1..22: mol_type = genomic DNA
tatgtagttcttctcagttcct

SEQ ID NO: 6203 - DNA, 22 bp, Homo sapiens
  source 1..22: mol_type = genomic DNA
cttcttctttgatttcactggt

SEQ ID NO: 6204 - DNA, 22 bp, Homo sapiens
  source 1..22: mol_type = genomic DNA
ttcttctttgatttcactggtt

SEQ ID NO: 6205 - DNA, 22 bp, Homo sapiens
  source 1..22: mol_type = genomic DNA
atttcactggtttgcagcgata

SEQ ID NO: 6206 - DNA, 22 bp, Homo sapiens
  source 1..22: mol_type = genomic DNA
actggtttgcagcgatagatca

SEQ ID NO: 6207 - DNA, 22 bp, Homo sapiens
  source 1..22: mol_type = genomic DNA
cagcgatagatcataaaaagac

SEQ ID NO: 6208 - DNA, 22 bp, Homo sapiens
  source 1..22: mol_type = genomic DNA
gaaatatgtcattaatttggcc

SEQ ID NO: 6209 - DNA, 22 bp, Homo sapiens
  source 1..22: mol_type = genomic DNA
aaatatgtcattaatttggccc

SEQ ID NO: 6210 - DNA, 22 bp, Homo sapiens
  source 1..22: mol_type = genomic DNA
gcccttcgtcttatggacaaag

SEQ ID NO: 6211 - DNA, 22 bp, Homo sapiens
  source 1..22: mol_type = genomic DNA
agaccatgtcccaactgaagga

SEQ ID NO: 6212 - DNA, 22 bp, Homo sapiens
  source 1..22: mol_type = genomic DNA
tacatcgtctaacatagcaaat

SEQ ID NO: 6213 - DNA, 22 bp, Homo sapiens
  source 1..22: mol_type = genomic DNA
acatcgtctaacatagcaaatc

SEQ ID NO: 6214 - DNA, 22 bp, Homo sapiens
  source 1..22: mol_type = genomic DNA
catcgtctaacatagcaaatct

SEQ ID NO: 6215 - DNA, 22 bp, Homo sapiens
  source 1..22: mol_type = genomic DNA
ggctctggagatagagaatcaa

SEQ ID NO: 6216 - DNA, 22 bp, Homo sapiens
  source 1..22: mol_type = genomic DNA
gctctggagatagagaatcaaa

SEQ ID NO: 6217 - DNA, 22 bp, Homo sapiens
  source 1..22: mol_type = genomic DNA
ttttatttgactatgctgttgg

SEQ ID NO: 6218 - DNA, 22 bp, Homo sapiens
  source 1..22: mol_type = genomic DNA
atttgactatgctgttggttta

SEQ ID NO: 6219 - DNA, 22 bp, Homo sapiens
  source 1..22: mol_type = genomic DNA
tttgactatgctgttggtttaa

SEQ ID NO: 6220 - DNA, 22 bp, Homo sapiens
  source 1..22: mol_type = genomic DNA
actatgctgttggtttaattgt

SEQ ID NO: 6221 - DNA, 22 bp, Homo sapiens
  source 1..22: mol_type = genomic DNA
attgtttatattggtcttccac

SEQ ID NO: 6222 - DNA, 22 bp, Homo sapiens
  source 1..22: mol_type = genomic DNA
tattggtcttccacggtctgga

SEQ ID NO: 6223 - DNA, 22 bp, Homo sapiens
  source 1..22: mol_type = genomic DNA
tattcttttatcagctcagaag

SEQ ID NO: 6224 - DNA, 22 bp, Homo sapiens
  source 1..22: mol_type = genomic DNA
atcagctcagaaggactagtat

SEQ ID NO: 6225 - DNA, 22 bp, Homo sapiens
  source 1..22: mol_type = genomic DNA
tcagctcagaaggactagtatt

SEQ ID NO: 6226 - DNA, 22 bp, Homo sapiens
  source 1..22: mol_type = genomic DNA
tctatcttccaagccaagagca

SEQ ID NO: 6227 - DNA, 22 bp, Homo sapiens
  source 1..22: mol_type = genomic DNA
tgtgggttcttgaatactagtc

SEQ ID NO: 6228 - DNA, 22 bp, Homo sapiens
  source 1..22: mol_type = genomic DNA
attgattctaggcattcctgct

SEQ ID NO: 6229 - DNA, 22 bp, Homo sapiens
  source 1..22: mol_type = genomic DNA
ttgattctaggcattcctgctg

SEQ ID NO: 6230 - DNA, 22 bp, Homo sapiens
  source 1..22: mol_type = genomic DNA
taacagaggtgaacatacaagt

SEQ ID NO: 6231 - DNA, 22 bp, Homo sapiens
  source 1..22: mol_type = genomic DNA
tcatgtctactgtgatgttata

SEQ ID NO: 6232 - DNA, 22 bp, Homo sapiens
  source 1..22: mol_type = genomic DNA
catgtctactgtgatgttatat

SEQ ID NO: 6233 - DNA, 22 bp, Homo sapiens
  source 1..22: mol_type = genomic DNA
atgtctactgtgatgttatatc

SEQ ID NO: 6234 - DNA, 22 bp, Homo sapiens
  source 1..22: mol_type = genomic DNA
acctgatataacatcacagtag

SEQ ID NO: 6235 - DNA, 22 bp, Homo sapiens
  source 1..22: mol_type = genomic DNA
cctgatataacatcacagtaga

SEQ ID NO: 6236 - DNA, 22 bp, Homo sapiens
  source 1..22: mol_type = genomic DNA
attcattatattcaggtagtcc

SEQ ID NO: 6237 - DNA, 22 bp, Homo sapiens
  source 1..22: mol_type = genomic DNA
tagttctcccacgtttcattga

SEQ ID NO: 6238 - DNA, 22 bp, Homo sapiens
  source 1..22: mol_type = genomic DNA
attgaagttttgtgatccatct

SEQ ID NO: 6239 - DNA, 22 bp, Homo sapiens
  source 1..22: mol_type = genomic DNA
gtgatccatctattcgatgttg

SEQ ID NO: 6240 - DNA, 22 bp, Homo sapiens
  source 1..22: mol_type = genomic DNA
tgatccatctattcgatgttga

SEQ ID NO: 6241 - DNA, 22 bp, Homo sapiens
  source 1..22: mol_type = genomic DNA
cttttcaggagaattttggttg

SEQ ID NO: 6242 - DNA, 22 bp, Homo sapiens
  source 1..22: mol_type = genomic DNA
ttttcaggagaattttggttgg

SEQ ID NO: 6243 - DNA, 22 bp, Homo sapiens
  source 1..22: mol_type = genomic DNA
caggagaattttggttgggcct

SEQ ID NO: 6244 - DNA, 22 bp, Homo sapiens
  source 1..22: mol_type = genomic DNA
aggagaattttggttgggccta

SEQ ID NO: 6245 - DNA, 22 bp, Homo sapiens
  source 1..22: mol_type = genomic DNA
ggttgggcctagagaagatata

SEQ ID NO: 6246 - DNA, 22 bp, Homo sapiens
  source 1..22: mol_type = genomic DNA
gttgggcctagagaagatatac

SEQ ID NO: 6247 - DNA, 22 bp, Homo sapiens
  source 1..22: mol_type = genomic DNA
acgaattgagttggaagactgg

SEQ ID NO: 6248 - DNA, 22 bp, Homo sapiens
  source 1..22: mol_type = genomic DNA
cgaattgagttggaagactgga

SEQ ID NO: 6249 - DNA, 22 bp, Homo sapiens
  source 1..22: mol_type = genomic DNA
tacttgggaaatcacgaaacca

SEQ ID NO: 6250 - DNA, 22 bp, Homo sapiens
  source 1..22: mol_type = genomic DNA
acttgggaaatcacgaaaccaa

SEQ ID NO: 6251 - DNA, 22 bp, Homo sapiens
  source 1..22: mol_type = genomic DNA
cttgggaaatcacgaaaccaac

SEQ ID NO: 6252 - DNA, 22 bp, Homo sapiens
  source 1..22: mol_type = genomic DNA
gtgttttctacttgggatcaca

SEQ ID NO: 6253 - DNA, 22 bp, Homo sapiens
  source 1..22: mol_type = genomic DNA
ctacttgggatcacaaagcaaa

SEQ ID NO: 6254 - DNA, 22 bp, Homo sapiens
  source 1..22: mol_type = genomic DNA
tacttgggatcacaaagcaaaa

SEQ ID NO: 6255 - DNA, 22 bp, Homo sapiens
  source 1..22: mol_type = genomic DNA
gctttgtgatcccaagtagaaa

SEQ ID NO: 6256 - DNA, 22 bp, Homo sapiens
  source 1..22: mol_type = genomic DNA
ctttgtgatcccaagtagaaaa

SEQ ID NO: 6257 - DNA, 22 bp, Homo sapiens
  source 1..22: mol_type = genomic DNA
tgatcccaagtagaaaacacca

SEQ ID NO: 6258 - DNA, 22 bp, Homo sapiens
  source 1..22: mol_type = genomic DNA
ttttccgggattgcattgggga

SEQ ID NO: 6259 - DNA, 22 bp, Homo sapiens
  source 1..22: mol_type = genomic DNA
ccgggattgcattggggacatt

SEQ ID NO: 6260 - DNA, 22 bp, Homo sapiens
  source 1..22: mol_type = genomic DNA
cgggattgcattggggacattg

SEQ ID NO: 6261 - DNA, 22 bp, Homo sapiens
  source 1..22: mol_type = genomic DNA
gtgatttcccaagtaaaaagaa

SEQ ID NO: 6262 - DNA, 22 bp, Homo sapiens
  source 1..22: mol_type = genomic DNA
ttgtctttccagtcttccaact

SEQ ID NO: 6263 - DNA, 22 bp, Homo sapiens
  source 1..22: mol_type = genomic DNA
cagtcttccaactcaattcgta

SEQ ID NO: 6264 - DNA, 22 bp, Homo sapiens
  source 1..22: mol_type = genomic DNA
ggaggctggtggtggcatgatg

SEQ ID NO: 6265 - DNA, 22 bp, Homo sapiens
  source 1..22: mol_type = genomic DNA
aaatttgcctcagttcattcaa

SEQ ID NO: 6266 - DNA, 22 bp, Homo sapiens
  source 1..22: mol_type = genomic DNA
aatttgcctcagttcattcaaa

SEQ ID NO: 6267 - DNA, 22 bp, Homo sapiens
  source 1..22: mol_type = genomic DNA
cctcagttcattcaaagctttc

SEQ ID NO: 6268 - DNA, 22 bp, Homo sapiens
  source 1..22: mol_type = genomic DNA
tgaatctgttggatggatcaac

SEQ ID NO: 6269 - DNA, 22 bp, Homo sapiens
  source 1..22: mol_type = genomic DNA
tagagtataaccttccattttg

SEQ ID NO: 6270 - DNA, 22 bp, Homo sapiens
  source 1..22: mol_type = genomic DNA
gagacttccaagataatcctct

SEQ ID NO: 6271 - DNA, 22 bp, Homo sapiens
  source 1..22: mol_type = genomic DNA
agacttccaagataatcctctt

SEQ ID NO: 6272 - DNA, 22 bp, Homo sapiens
  source 1..22: mol_type = genomic DNA
gctcttggtttgttatatttac

SEQ ID NO: 6273 - DNA, 22 bp, synthetic construct
  source 1..22: mol_type = other DNA
ctcttggtttgttatatttacc

SEQ ID NO: 6274 - protein, 515 aa, unidentified
  source 1..515: note = MG91-666 effector
MANNKNDNEGRFVYTFNCLKTNTAQEHILNEMFKQATSLYNDIQRQMLNTYKFIISHNAYKNAETRKEKNDFIKNFKIDVKSARRGIISKSFNGDKGYIASLSVRYGVNYPYISGTIAEDFGKNAWTAWEKKLWGNGKRITFHSNENPIKSISTRYKTSNKKLSGMDFDEDVKNVIITVGKHKLTIPIISRGTEYDAYAIDLIKNHMFSNGTIVRKKIRGKIKYELQITLKGVPYNKMRKLGKGNVGVDIGMSMVATYGNKLSLDALSAENKKEYQKELEVLERKMDRSRRATNPDNYDDKGRIVGKEKRTPWVYSKNYNVLKNKHSEIFRRYTNKRKILQNDLSNKLLEMGDTFYIENCNIAGMAKRAKETTVNPKTGRPRSKKRLGKSIQSNAPSEFLETLKRKVTTLGGTVYNVNPQIAATQFDFTDGTFKKHSLSERNVTLSNGNKHTRDGIAAFNLKHSKVGATEKLVDSYNITEMMNDYDKFIISERQEMNEHKNGLKISKNSMGIFGC

SEQ ID NO: 6275 - protein, 498 aa, unidentified
  source 1..498: note = MG91-667 effector
MYCIKFPLKTKSSDEARIDKFFIHCCMVYNRVNGILSKEWRRITEECKDDNGKVDYKMRRKIAKEISYNEGGISSDATKEGGKTYSMFSRFGITNIIACICKEDIGNGHSYANLGENNISISSKYQSQIALRLTGAWEKVMKENAVSHKKKCSEWGSMKSNINEKTKHILIDIEKKTLSVKYGKNNYMVIPFVANPSKKEYEAVALSSTIKELGITSEVVRGRKRYYLTATVDGTPYNKGRKLGEGAIGIDPGVSSVTYYGKTVGQYKMDTDIKKLEDEKAKLLRYLDRSRRATNKDNYTADGQIKRGIKLNWVKSNRYIVAQNRLREIERSISDKRKREQIDFVNEMLSEGNELHIEKNDVSSWSRRKSGITKGKNGRIKSNKRFGKSLHYAAPAQFVTIAKNKFTALGGTVVEVPSSVAAATATDHTSNFERTKRELKERSVKLSDGTVHDRDAHAAFNLKHCREDGKYDEEGMLSDYGNFCREEQKAWDQLKYQK

SEQ ID NO: 6276 - protein, 505 aa, unidentified
  source 1..505: note = MG91-668 effector
MAKKENTNTNPSFVIEFRMHPEPWQADILSKQMEYLRHLYNRANSILLREYKKMIATPEFKEAVESKKKKNIAEVVKNYKFVVDMGVFVQEVTFSEFGFKGLVRRFGKLLIDDNSIYSDKGINTTMLGIVSNRLWSAYDKLLFDKKCTMTHFKSIGMFNSLPFGFSSGNLIGIQNIDFKNNVIVIRRKKQTGMSIRFEGIKTHYDNLALNGGDVTIKQLTIVRRTIRGKERYFVQFTINGTAPSTGRCIGTGTLGLDMGPHSLKYVADDAIDYINLSDSSNEDFAEYKRLQRKLDRSRRATNLHMYDEQGCSIKGAKQTVKSNRYKKTEAKLNDMKRQAAARRKIAQNIAANQVLVHGNHIVVEDNPFKGWQKRRSGKAFNKKGRQLSKKRFGRSILKGAPSQFVTILENKANASGGWMYKASCKNAASKFDIFTKEVDNDIKLSDRRVTMSDGIEHDRDYNAAFKLKHLKPFSKEQKDYDYVAMYRDYPKFCEMEKTRESSLKQ

SEQ ID NO: 6277 - protein, 491 aa, unidentified
  source 1..491: note = MG91-669 effector
MQFTVVIPFKPSNELKNDIDKGLKLLTTRYNTEAKKLKKRYDFWKNTKAYKIAEKEGIDSVSKFWEERSFNGEYGIDKLFKINNFKTHTKPKKNIYKNTIVNASMLQILRANLWRSVDKLIKGKGKNIRYVTMQTIPFKSLRGIKWNQKDSVFSFTHKRGHVITQHIDVKTPYELHAFNNCDMRMVTIKKEIIRGKEKYFFHICFEGTPYNKGRALGTASVGIDPSLENMYACFSNGDMEKLSLIQRIDEEFDIYHKVHVNKIDLLRQKLDRQRRANNPQFFNENGTINREALKQANYTWNDSNGYKKTRNALKDIQRKIALRRKQCHFALANYILSKANKIIVEHNKFAAFAKKSQKDTYKPNGQQYSKRRFGRSINHGAPSYFITILKNKALCWGEKASFKLLSEFNGCTKFDHTNQEFNNEIKRNDKVVTLSNGDKVDRDLHAAMNILFCENGIEQNARRRVEKSADHFNIAIMEEFYNQHKDKMIAI

SEQ ID NO: 6278 - protein, 495 aa, unidentified
  source 1..495: note = MG91-670 effector
MPFKPSNELQHDIEQGFKLLTIRYNTELKKLKKRYDYLIKTQEYEIAKREKHEKTFWEDNNFTKYDFYEFFFRINSFKRAQHPQQSIYDNTIVSSTMLRALGDHLLSSFDKLLYQNGKDVHPKKISSMTFRGLVQIRYNSQTQSFEFTHRGRRNIISQKVDIKTDYEIYAFNNPIKEVTIKKQIIRGKEKYFFHICFRGTPYNKGRELGTNSVGIDPSMLKMFACYSNGEMIEHSLLDKIDEKSGEICDSKYNSDKYEKLEKKIGVLQTQINRRRRIENPKFFKENGEINEEALNQARLEHPNSDPWKYSKATIKMRNKVAQIKRNLALHRKECHFRLANYILSKANTIKVENNSYKSFQARAKETTYNANGRPRSKKRFGKSIQKGAPSAFITILKNKAASWGDRVSFSEVGASEACTQFDHTNDEFTKHELKERVVELSNGDRVHRDFHAAMNILFFKNTVTKSKKGTKKDSDHFDIEGLREFYSQHRENMIT

SEQ ID NO: 6279 - protein, 495 aa, unidentified
  source 1..495: note = MG91-671 effector
MSDSSTEKSVFVVTFPLKTEKWQEDRINKMMRLLTVFYNEKQKVLLERWMHIRNSAEYKEHKEEKSKNSLTAYMRNFGFSEFGFKEFFKDKNQTDSPYITHGLNSAILRNLAKSAWSAWSKKLEEKKKNIFIHTDKDVSIIKSDFKSSNNKISGFDVNYEDYSITMSASKPHVHTMFTIPFVVDRNSEYELFALGEIQNDPTKLRNLAIVRKEVRGKYKYYVQFSIAGKPYNKGRQLGSGVVGIDPGPSKIAVVSDTAVRIIPLAKSIERDERETRRLQRKLDRSRRAMNPDNYNEDGTLSKGKHEWVKSHHYEETRSILADRQRKLAAKRKIAHNELANELLQMGNEFHVENNSFRSMQVRAKETTKNANGKNRTKKRFGKSLANRAPSEFLIILENKVKQYENGVYVDIPDSIACTQYDFTSGDFSAHELRERTITTSDGIRHDRDALAAFNMKFVRTEQVVEKKKVKKAVDNFDNESMAEFYPLFCQMENKE

SEQ ID NO: 6280 - protein, 487 aa, unidentified
  source 1..487: note = MG91-672 effector
MPNNIDKSVFVVTFPLKTEVWQEDRINKMMRLLTQLYNDKQDLLLRRYIHLSHSAEFKEARKTGIKTFSKFMTEQGFSKFGIEKVFSDSSKSDSLQNQQLLCHGLNSDIIQELSHRSWSAWEKKLFGHGKFIKTNNEVDTLKSRAHKGNVTGFRCSMVDFTLTMTATKPNKHIVFTIPFVVDRNSEYELFALNQEIRNIAIVRKKIRGRYKYFVQFSFAGVPHNKGRKLGKGVVGIDPGPSKIAVVSDTEVKIMPLAESIREDEREKARIQRKLDRSRRAMNPDNYNEDGTISKGRHEWNKSNHYIALQSKLADNQRKLATKRKIAHNELANELLAMGNEFRVENNSFRSMQARTKDTTKNARGKNRSKKRFGKSLYNCAPSEFLTILQNKVNQYEDGKYVDIPASTACTQYDFTNGQFTKHELRERTITTSDGKQHDRDALAAFNMKFVREEKVVGKKKIEKSDKNFDNESMATFYPRFCQMENKH

SEQ ID NO: 6281 - protein, 484 aa, unidentified
  source 1..484: note = MG91-673 effector
MAHKENQKAFVVTFPLRTEKWQEDRIDKMMRMLTTFYNDRQRKLVRRYIYLSHSKAYKEAKGKGVVAFKNYMKENGFSQYGLDAFFKADTKGALYQCGLNSMFLQYLSQCAWSAWDKKLFGKGDFVKTDKVVNIFCSRNKKGRFCGFDYDLSTFTIRIKSTCTKEIICSIPFVVNKNSEYELYALSQKICRIGILRKLIRSKYKYYVQFTFDGVPYNKGRNIGTGIVGIDPGPSKIAIVGDNKVGIAKLAHGIEEDERKTARLKRKLDRSRRATNPHMYKEDGTIIKGQRQTCFSKAYNETRKQLADAQRKLAAKRKIAHNELANTLLEYGDTFKVEANSYKSMQARAKATSMTKSGRIRSKKRYGKSIKNRAPSEFLVILKNKLLYYSKGKYYDVPSSYACTQFDFTNESFTEHKISERRIVTSDGIQHNRDTLAAFNIKNAIVNDTSTKKKKVTKSKEFFDIVKMKASYNEFCVMEHYLLSE

SEQ ID NO: 6282 - RNA, 247 nt, unidentified
  source 1..247: mol_type = other RNA; note = MG91-670 intergenic region 2
gaaataaaaaaatagccaatagcttgatattattatatcatgggtttgtactaccaggtaagaagctatttggtacaatctcaatggcaactatgccatcttactaacgtcaaggcggtttaaacctaactttcaagcgccgtacaaaaaaaatatggtaaaacattttatttttgtgtcttgaattcgattttttctcgctgattgcgaccctaaggtgctgaaatagaagaagatacacgctata

SEQ ID NO: 6283 - DNA, 25 bp, unidentified
  source 1..25: mol_type = other DNA; note = MG91-670 repeat
cttgtacttaccctatattttaggg

SEQ ID NO: 6284 - RNA, 175 nt, synthetic construct
  source 1..175: mol_type = other RNA
acagaaaaggatttgttatcctacatcatcgttaagatgtttaattaacttttagttctttgaatatttgatgaaataatgtgagtggaacataaataataaagtgttaggtaacagagacaccttaaaattatggaaaatttcactatcctttcgaaagaaggggtaaaacagg

SEQ ID NO: 6285 - RNA, 175 nt, synthetic construct
  source 1..175: mol_type = other RNA
acagaaaaggatttgttatcctacatcatcgttaagatgtttaattaacatattgttctttgaatatttgatgaaataatgtgagtggaacataaataataaagtgttaggtaacagagacaccttaaaattatggaaaatttcactatcctttcgaaagaaggggtaaaacagg

SEQ ID NO: 6286 - RNA, 175 nt, synthetic construct
  source 1..175: mol_type = other RNA
acagaaaaggatttgttatcctacatcatcgttaagatgtttaattaactaatagttctttgaatatttgatgaaataatgtgagtggaacataaataataaagtgttaggtaacagagacaccttaaaattatggaaaatttcactatcctttcgaaagaaggggtaaaacagg

SEQ ID NO: 6287 - RNA, 188 nt, synthetic construct
  source 1..188: mol_type = other RNA
agggtaatgtgaaacccaagcggaagttatacgaaaaacatattgttcaaaatatgtcagtagttttccgcaaatcgtgcgtaaaatagaatctggatagataatggtttaccattgttgaaagcggtttcttgctgaatttatttcggacacacgcagcctttcggaaatgaaaggtgaacacaggt

SEQ ID NO: 6288 - RNA, 188 nt, synthetic construct
  source 1..188: mol_type = other RNA
agggtaatgtgaaacccaagcggaagttatacgaaaaacatattgttcaaaatatgtcagtagtcttccgcaaatcgtgcgtaaaatagaatctggatagataatggtttaccattgttgaaagcggtttcttgctgaatttatttcggacacacgcagcctttcggaaatgaaaggtgaacacaggt

SEQ ID NO: 6289 - RNA, 188 nt, synthetic construct
  source 1..188: mol_type = other RNA
agggtaatgtgaaacccaagcggaagttatacgaaaaacatattgttcaaaatatgtcagtagacttccgcaaatcgtgcgtaaaatagaatctggatagataatggtttaccattgttgaaagcggtttcttgctgaatttatttcggacacacgcagcctttcggaaatgaaaggtgaacacaggt

SEQ ID NO: 6290 - RNA, 212 nt, synthetic construct
  source 1..212: mol_type = other RNA
cagtgatacaaatgaaatcccggttttgttacgccgggtatcatctggacaaatgtccagttcagctgacgttaattgccgggttactggcatagtcagcgaaagtgcgaaacggaaaatagaaccgttaaacgacttctgcttgcagaggttcaagtagtctatgagtacgttagcgttacttatatagaaatatgttggtgattaacaag

SEQ ID NO: 6291 - RNA, 212 nt, synthetic construct
  source 1..212: mol_type = other RNA
cagtgatacaaatgaaatcccggcgttgttacgccgggtatcatctggacaaatgtccagttcagctgacgttaattgccgggttactggcatagtcagcgaaagtgcgaaacggaaaatagaaccgttaaacgacttctgcttgcagaggttcaagtagtctatgagtacgttagcgttacttatatagaaatatgttggtgattaacaag

SEQ ID NO: 6292 - RNA, 212 nt, synthetic construct
  source 1..212: mol_type = other RNA
cagtgatacaaatgaaatcccggctatgttacgccgggtatcatctggacaaatgtccagttcagctgacgttaattgccgggttactggcatagtcagcgaaagtgcgaaacggaaaatagaaccgttaaacgacttctgcttgcagaggttcaagtagtctatgagtacgttagcgttacttatatagaaatatgttggtgattaacaag

SEQ ID NO: 6293 - RNA, 204 nt, synthetic construct
  source 1..204: mol_type = other RNA
gggatttgtaatcccgttgtgagcgataattgacacaaggtgtcattgctcatcaaaagaactaatggaacaaaaagtgaacaataggtcgttctctgtacaaaatcacaaagatggatgtctctgaaggtactatcgaaaacttttaagtacatggttcatgccctatttattgatgaaatcaatttgtagggtaaatacaag

SEQ ID NO: 6294 - RNA, 204 nt, synthetic construct
  source 1..204: mol_type = other RNA
gggatttgtaatcccgttgtgagcgataattgacacaaggtgtcattgctcatcaaaagaactaatggaactattagtgaacaataggtcgttctctgtacaaaatcacaaagatggatgtctctgaaggtactatcgaaaactaataagtacatggttcatgccctatttattgatgaaatcaatttgtagggtaaatacaag

SEQ ID NO: 6295 - RNA, 204 nt, synthetic construct
  source 1..204: mol_type = other RNA
gggatttgtaatcccgttgtgagcgataattgacacaaggtgtcattgctcatcaaaagaactaatggaactaatagtgaacaataggtcgttctctgtacaaaatcacaaagatggatgtctctgaaggtactatcgaaaactattaagtacatggttcatgccctatttattgatgaaatcaatttgtagggtaaatacaag

SEQ ID NO: 6296 - RNA, 214 nt, synthetic construct
  source 1..214: mol_type = other RNA
tggagaataaacattaaaggatttgtaatcccgttgtgagcgctaattgacacagtggtgtcattgctcatcgaaagagtgattggaacaaaagcgaacaccgtctcgctcttggcttttctttttaatttttgagctttgagagtaatggtcgcatgacactttttagtacaacattcttaccttacatagaaatatgtggggtaaatacaag

SEQ ID NO: 6297 - RNA, 214 nt, synthetic construct
  source 1..214: mol_type = other RNA
tggagaataaacattaaaggatttgtaatcccgttgtgagcgctaattgacacagtggtgtcattgctcatcgaaagagtgattggaacaatagcgaacaccgtctcgctcttggctcatctatataattgatgagctttgagagtaatggtcgcatgacacatattagtacaacattcttaccttacatagaaatatgtggggtaaatacaag

SEQ ID NO: 6298 - RNA, 214 nt, synthetic construct
  source 1..214: mol_type = other RNA
tggagaataaacattaaaggatttgtaatcccgttgtgagcgctaattgacacagtggtgtcattgctcatcgaaagagtgattggaacaatagcgaacaccgtctcgctcttggcttatctatatatataatgagctttgagagtaatggtcgcatgacacatattagtacaacattcttaccttacatagaaatatgtggggtaaatacaag

SEQ ID NO: 6299 - RNA, 249 nt, synthetic construct
  source 1..249: mol_type = other RNA
atctatggcaacgttttatccacgtttttgccaaatggagaataaacattaaaggatttgtaatcccgttgtgagcgctaattgacacagtggtgtcattgctcatcgaaagagtgattggaacaaaagcgaacaccgtctcgctcttggcttttctttttaatttttgagctttgagagtaatggtcgcatgacactttttagtacaacattcttaccttacatagaaatatgtggggtaaatacaag

SEQ ID NO: 6300 - RNA, 186 nt, synthetic construct
  source 1..186: mol_type = other RNA
gaaataatggtattgtaaaccaacattagcgctaattgacatatagtgtcattgctaaaataaagatgtattgaaagaaagcagaatgagatcatgtagaaaacattcgtaagaatcttttcgaacgatatcagaaactctttaaagtaagtacatcctatcctttgaaagaagggtagttacaag

SEQ ID NO: 6301 - RNA, 186 nt, synthetic construct
  source 1..186: mol_type = other RNA
gaaataatggtattgtaaaccaacattagcgctaattgacatatagtgtcattgctaaaataaagatgtattgaaagaaagcagaatgagatcatgtagatatcattcgtaagaatcatatcgaacgatatcagaaactctttaaagtaagtacatcctatcctttgaaagaagggtagttacaag

SEQ ID NO: 6302 - RNA, 186 nt, synthetic construct
  source 1..186: mol_type = other RNA
gaaataatggtattgtaaaccaacattagcgctaattgacatatagtgtcattgctaaaataaagatgtattgaaagaaagcagaatgagatcatgtagataacattcgtaagaatcttatcgaacgatatcagaaactctttaaagtaagtacatcctatcctttgaaagaagggtagttacaag

SEQ ID NO: 6303 - RNA, 213 nt, synthetic construct
  source 1..213: mol_type = other RNA
tggagcattatctcctttcagaataaagaaataatggtattgtaaaccaacattagcgctaattgacatatagtgtcattgctaaaataaagatgtattgaaagaaagcagaatgagatcatgtagaaaacattcgtaagaatcttttcgaacgatatcagaaactctttaaagtaagtacatcctatcctttgaaagaagggtagttacaag

SEQ ID NO: 6304 - RNA, 188 nt, synthetic construct
  source 1..188: mol_type = other RNA
aaaagaaaggcgttgttaggccttgcggacgtcaagctaatgccagtgggcggctggtccgacaaacgatttgcagaatggtggaatgcaaaaataacagtcagttccttcgagaacgggagtatagagcaagtccccgagtatgcttatcatagtctttttattgaaaaatgtagactattaacagg

SEQ ID NO: 6305 - RNA, 188 nt, synthetic construct
  source 1..188: mol_type = other RNA
aaaagaaaggcgttgttaggccttgcggacgtcaagctaatgccagtgggcggctggtccgacaaacgatttgcagaatggtggaatgcaaaaataacagtcagttccttcgagaacgggagtatagagcaagtccccgagtatgcttatcatagtctattcattgaaaaatgtagactattaacagg

SEQ ID NO: 6306 - RNA, 188 nt, synthetic construct
  source 1..188: mol_type = other RNA
aaaagaaaggcgttgttaggccttgcggacgtcaagctaatgccagtgggcggctggtccgacaaacgatttgcagaatggtggaatgcaaaaataacagtcagttccttcgagaacgggagtatagagcaagtccccgagtatgcttatcatagtctatacattgaaaaatgtagactattaacagg

SEQ ID NO: 6307 - RNA, 201 nt, synthetic construct
  source 1..201: mol_type = other RNA
catacagaggttttgttaagcctcacaatcttaataattaagtgttctttgaaatatttagttgattgtaaatctattttgggaaataaaaaaacaaaaattacagttattagttaactaagaagagtatagagttagttttaaagtaccaaaatataccctaaattattggaaataataaagttagggtactaacaagaa

SEQ ID NO: 6308 - RNA, 186 nt, synthetic construct
  source 1..186: mol_type = other RNA
catacagaggttttgttaagcctcacaatcttaataattaagtgttctttgaaatatttagttgattgtaaatctattttgggaaataaaaaaacaaaaattacagttattagttaactaagaagagtatagagttagttttaaagtaccaaaatataccctaagaaattagggtactaacaagaa

SEQ ID NO: 6309 - RNA, 186 nt, synthetic construct
  source 1..186: mol_type = other RNA
catacagaggcattgttatgcctcacaatcttaataattaagtgttctttgaaatatttagttgattgtaaatctatatagggaaataaaatatcaaaaattacagttattagttaactaagaagagtatagagttagatataaagtacctatatataccctaagaaattagggtactaacaagaa

SEQ ID NO: 6310 - RNA, 186 nt, synthetic construct
  source 1..186: mol_type = other RNA
catacagaggcatcgttatgcctcacaatcttaataattaagtgttctttgaaatatttagttgattgtaaatctatattgggaaataaaatatcaaaaattacagttattagttaactaagaagagtatagagttagatataaagtaccaatatataccctaagaaattagggtactaacaagaa

SEQ ID NO: 6311 - RNA, 182 nt, synthetic construct
  source 1..182: mol_type = other RNA
agaaatatggatttgtaatccaatcttagcgttaatggcaaacaattgccattgctaaaacaaagatgtgatgaaataaagcagaatgttatcatgtaaaaatggctatcttgcctttttgaacgatagcaaatactatttaaagtaagaacatcctatcctagaaatagggtagttacaag

SEQ ID NO: 6312 - RNA, 182 nt, synthetic construct
  source 1..182: mol_type = other RNA
agaaatatggatttgtaatccaatcttagcgttaatggcaaacaattgccattgctaaaacaaagatgtgatgaaataaagcagaatgttatcatgtatatatggctatcttgcctatatgaacgatagcaaatactatttaaagtaagaacatcctatcctagaaatagggtagttacaag

SEQ ID NO: 6313 - RNA, 182 nt, synthetic construct
  source 1..182: mol_type = other RNA
agaaatatggatttgtaatccaatcttagcgttaatggcaaacaattgccattgctaaaacaaagatgtgatgaaataaagcagaatgttatcatgtattaatggctatcttgccttaatgaacgatagcaaatactatttaaagtaagaacatcctatcctagaaatagggtagttacaag

SEQ ID NO: 6314 - RNA, 194 nt, synthetic construct
  source 1..194: mol_type = other RNA
agaaatatggatttgtaatccaatcttagcgttaatggcaaacaattgccattgctaaaacaaagatgtgatgaaataaagcagaatgttatcatgtaaaaatggctatcttgcctttttgaacgatagcaaatactatttaaagtaagaacatcctatcctaactttattgaaaaatatagggtagttacaag

SEQ ID NO: 6315 - RNA, 193 nt, synthetic construct
  source 1..193: mol_type = other RNA
taaaaaaagatattaggttttgttaagcctaacaatcgttaagtgttctttggaatattgattgtaaatctattttgggaaataaaaaagcaaaaattacagttatcagtttactgagaagagtatagagttagttttaaagtaccaaaatataccctaaattattgaaaaataaagttagggtactaacaag

SEQ ID NO: 6316 - RNA, 219 nt, synthetic construct
  source 1..219: mol_type = other RNA
cacgcagttgtactgtaggatattaataaaaaaagatattaggttttgttaagcctaacaatcgttaagtgttctttggaatattgattgtaaatctattttgggaaataaaaaagcaaaaattacagttatcagtttactgagaagagtatagagttagttttaaagtaccaaaatataccctaaattattgaaaaataaagttagggtactaacaag

SEQ ID NO: 6317 - RNA, 219 nt, synthetic construct
  source 1..219: mol_type = other RNA
cacgcagttgtactgtaggatattaataaaaaaagatattaggcattgttatgcctaacaatcgttaagtgttctttggaatattgattgtaaatctatatagggaaataaaatagcaaaaattacagttatcagtttactgagaagagtatagagttagctataaagtacctatatataccctaaattattgaaaaataaagttagggtactaacaag

SEQ ID NO: 6318 - RNA, 219 nt, synthetic construct
  source 1..219: mol_type = other RNA
cacgcagttgtactgtaggatattaataaaaaaagatattaggcatagtaatgcctaacaatcgttaagtgttctttggaatattgattgtaaatctatatagggaaataaaatagcaaaaattacagttatcagtttactgagaagagtatagagttagctataaagtacctatatataccctaaattattgaaaaataaagttagggtactaacaag

SEQ ID NO: 6319 - RNA, 195 nt, synthetic construct
  source 1..195: mol_type = other RNA
ataaaaataacatacagaggttttgttaagcctcacaatcttaataaataagtgttctttgaaaatatttagttgattgtaaatctattttgggaaataaaaaaacaaaaattacagttattagttaactaagaagagtatagagttagttttaaagtaccaaaatataccctaagaaattagggtactaacaag

SEQ ID NO: 6320 - RNA, 195 nt, synthetic construct
  source 1..195: mol_type = other RNA
ataaaaataacatacagaggctttgttaagcctcacaatcttaataaataagtgttctttgaaaatatttagttgattgtaaatctatatagggaaataaaaaatcaaaaattacagttattagttaactaagaagagtatagagttagatttaaagtacctatatataccctaagaaattagggtactaacaag

SEQ ID NO: 6321 - RNA, 195 nt, synthetic construct
  source 1..195: mol_type = other RNA
ataaaaataacatacagaggcattgttatgcctcacaatcttaataaataagtgttctttgaaaatatttagttgattgtaaatctatatagggaaataaaaattcaaaaattacagttattagttaactaagaagagtatagagttagaattaaagtacctatatataccctaagaaattagggtactaacaag

SEQ ID NO: 6322 - RNA, 202 nt, synthetic construct
  source 1..202: mol_type = other RNA
tatatttgcgacataaaggtgttgtcaggccttgcgtacgttaagctaatgccagtgggcggctggtgcgacaaacgattatgcagaatggtagaatgcaaaaataacagtcagttccttcgggaatgggagtatagagcaggtctccgagtatgcaaatcatggcctttttatttcgaaagaaatgtaggctattgacagg

SEQ ID NO: 6323 - RNA, 193 nt, synthetic construct
  source 1..193: mol_type = other RNA
gacataaaggtgttgtcaggccttgcgtacgttaagctaatgccagtgggcggctggtgcgacaaacgattatgcagaatggtagaatgcaaaaataacagtcagttccttcgggaatgggagtatagagcaggtctccgagtatgcaaatcatggcctttttatttcgaaagaaatgtaggctattgacagg

SEQ ID NO: 6324 - RNA, 193 nt, synthetic construct
  source 1..193: mol_type = other RNA
gacataaaggtgttgtcaggccttgcgtacgttaagctaatgccagtgggcggctggtgcgacaaacgattatgcagaatggtagaatgcaaaaataacagtcagttccttcgggaatgggagtatagagcaggtctccgagtatgcaaatcatggcctattcatttcgaaagaaatgtaggctattgacagg

SEQ ID NO: 6325 - RNA, 193 nt, synthetic construct
  source 1..193: mol_type = other RNA
gacataaaggtgttgtcaggccttgcgtacgttaagctaatgccagtgggcggctggtgcgacaaacgattatgcagaatggtagaatgcaaaaataacagtcagttccttcgggaatgggagtatagagcaggtctccgagtatgcaaatcatggccttaacatttcgaaagaaatgtaggctattgacagg

SEQ ID NO: 6326-6339 - skipped (14 entries)

SEQ ID NO: 6340 - protein, 1109 aa, unidentified
  source 1..1109: note = MG29-15 effector
GRTAEEGKKKIQGLNEYINLYNQKQEKNKRLPKLKLLYKQILSDRISTSFMAESFSEDQEVIDAIEEYYKFHLLAFQAEDKDDTENILEKVKELLSNIKEYDLSKIYLRNDTKITAISQKIFGNYGVFNTALEYYYATAVKPDFQKEYEKANQKKRDTLDKAQTQFVKQPYVSIELLQTAIDAYIATIDKGEEIYKRYSPTCIADYFKNNFKAEKKEKNDKEYGFIDNIKAKYSCIQGILGTPYPKDKKLIQQKNDIPNIKAFLDSLMELLHFTQPLSIVDEREVTKILTSDRLKIDKEWAEEANKSFFEKDKKFYEQFDLYFKELQKLIPLYNKVRNYATKKPYSTEKFKLNFENKGQFLGGWVDSHTENSDNATQAGGYLFRKKNQIGEYDYFLGVSSDSKLFRSHLRNEIVDEDKSEFERLDYYQLKSASVYGNSYIGNQSYDKDKENLFDSIIEFANRNNPAAKEDFNKYISSQKGDNKPTPNGLLKILQEKHSKALEELMIDGDFIRINTIVTDNLKNTILSLNRIPKSQEYKNTIFTLFTEPIQVIEELSKEKSFSYFPVSAKELEDSLNRELKPLLLFKISNQDLSYADSFSQGKRKSRGRENMHTLYFRQLMSGSQNILDIGTGEVFFRKSSIENPTIHKANEAVTNKNPLAKKKDSAFEYDIIKDRRFTVDKFQFHLSIIMNYQKPQKASDFNFEVLEFLQNNPNVNIIGLDRGERHLIYLTLINQKGEILLQESLNNISSENYPITTPYHDLLATKEKERDEARKSWGTIENIKELKEGYISQVVHKIAKLMVEHNAIVVMEDLNFGFKRGRFKVEKQVYQKLEKMLIDKLNYLVFKDKDPNEIGGLYKGLQLANKFESFQKMGKQSGFLFYVPAWNTSKIDPTTGFVNLFDTRYENLDKAKAFFSKFEDIRYNRTEKYFEFVVENYADFNAKAEGTKQDWTICSFGERIKNFRNPDALNQWDNKILNLTEEFKTLFTHNKIDITTELKEQIAQQNEAKFFKSLLELFKLTIQMRNSITNSEVDYLISPVKNKQGQFFDSRKADDTQPKDADANGAYNVAQKGLMWLEQINKFDGKDWKKLDLDKTNKGWLQFIQNKTQ

SEQ ID NO: 6341 - protein, 1280 aa, unidentified
  source 1..1280: note = MG29-16 effector
MFLGFINKYQLSKTLRFELKPIGKTLEFIEQKGLIVEDEARAEDYKRVKELIDKYHKEFIHQALSGIRLDGLDRYEELFFIQNRDEKTQKEFEKLQDDLRKQIVAGFKAHEAFKNIDKKELITVELPKFLKDEKDKKDREIVKKFDSFTTYFTGFHENRKNIYSDKAQHSSIGYRVIHENLSIFLSNKRAFESIQQNFPEIAQTAQNSLLEHLEGGVVEDMFGLDYFSRTLTQTYIDIYNTMLGGKVLKDGTKIQGLNEHINLYRQKYNIEKRKLPNLKALHKQILSDRESMSWLHESFANRDELNSTVEKFYKESIISFKQYNDAVDITEELINILSDESDYDLGKVFVKNDISLTAISQEIFKDYRVIKDALWQKHLADNPKATKSKDITVDEEKYFSRKNSYFSISQIEKALNKAELSDEAKKEKENYKGLFDFFKTKVAESSKAVKENFTDWQNNKEDKKLTKSLLDSMLNLQRAIKPLSVKAEDADDRSFYALFSTYFESLSGVIRIYDKVRNFESKKPYSMEKFKLNFENKGNFLGGWVDSSTEKSDNGTQSGGYLFRKRNGIGEFDYYLGISSDPKLFRSHLQDEIEKEDISDFERLDYYQLKSATVFGNSYVGDSYSKDRDLLYQKILEFVENTEPLKADIDKYVSSQKGTNQPTPSGIISIVKEKYPELLQKLKDDQGFSEINKTVTDRLKKTILSLHRIPRSQEYKNHNFSLFTEAIEVIEELSSEKSFAYFKVSKSELENALNRDSKPLFLFKITNKDLSFADSFIAGKRKSRGTDNLHTLYFKALMSGSQNVFDIGTGEVFYRKEDYKGKKIVHKANEPIENKNRLNDKKHSLFEYDIVKNRRYLVDKFQFHLSIVQNYIKPKKYPDFNTEVNQAIKGASDIKVIGVDRGERHLLYLSLIDSSGRIVEQYSLNQIINSHNGKKHIVDYHQKLADKEKERAEARENWGVVENIKELKEGYMSHVIHRIATLMVKHNAIVALEDLNFGFKRGRFKVEKQVYQKFEKMLIDKLNYLVDKQKSPNELGGLLKAFQLTNKFVSFEKLGKQSGFLFYVPAWNTSKIDPVTGFVNLLDTRYQSIEKSKEFFSKFDAIRYNDQKGYFEFEFDYKNFTTKADGTRTKWTLCTYGTRIKTFRNRDKNHQWDNVEVDLTAEFKSLFGLHSGDLKELIISQDRKEFFETLLYLLRLTLQMRNSVTNSEIDYLISPVADKNGNFYDSRVASDDLPRDADANGAYNIARKGLMIIEKIAKSKSGEKLNLTISNKEWLAYAQR

SEQ ID NO: 6342 - protein, 1286 aa, unidentified
  source 1..1286: note = MG29-17 effector
MFKNFTNQYQLSKTLRFELKPIGKTLNNINSKMLLEQDEKRASEYKVVKKIIDEYHKDFMNEAMDGFLFDNDDINSYERLFYIKDKSDEDKKAIESVQQKMRKKIAEKFQKHPLYKNLFAKELIKQDLLSWLDKKDNKFVTKIREITSDNTLMIDNMKTIVSNFSNFTTYFSGFHENRKNIYKADEKHTAVAYRVVHENLPIYLTNKRAFEKLNEKYPKLVSDAKNTVEHHLLGAVVEDMFTNDYFNHTASQTHIDLYNTMIGGTVLDDGTKVQGLNEKINLYRQQNGLTKKDIPNLKPLYKQILSDRELTSWLPESFESDNELLNAINDFYNNEIVNFNCCDGVINILDKLKEHFADTLLFDKERIYIRNDLSMTNISKDIFGDWSVIKGAIEEKYKLDNPREVKAKDGLEKIEKKIEKTKYFSIAHIEEALRSYLRDKDELRAKMSSDVIFDYFNNWDKTTVEHTVSNNIFDRIIDSFIAIKPLLSSEYSLDKKLSNDQDSKSKIKNFMDAITNLQRFVKPLHAKIDSELDIAFYANFDTYFEQLSLGVKLYDMVRNYLTKKPFSTDKFKLNFESGYLLNGWSQDYDTRAGLLFEKDGNYYLGVNVKKLTEDEKQYLLDNPNENLSKRVILDFQKPDNKNIPRLFIRSKGDNFAPAVTIYNLPIQSVIEIYDNGKFKTEYRKKNPKDYLDSLHKLIDYFKQGFLQHESYKHYKFGWKNTKDYLDIAQFYKDVETSCYEVKYEEVNWDRLMNYVESGKLYLFQIYNKDFSPYSKGTPNMHTLYWKMLFDKDNLSNVVYKLNGQAEIFFRKKSITNNIVTHDANEPINNKNSDNPKKSSTFDYDIIKDKRYTVDKFGFHVPITMNFKANGNDNINQQVNQAIKESNDIKVIGIDRGERHLLYLSLIDSSGKIIEQYSLNEIVNEHNCTTYKTNYHKLLDAKEKERGDARVNWGVVENIKELKEGYMSQVIHKVATLMVKHNAIVVLEDLNFGFKQGRFKVEKQVYQKFEKALIDKLNYFVDKKKDVNKLGGVLNALQLTSKFISFEKIGKQSGFLYYVPAWNTSKIDPITGFVNLFDTRYTSVEKAKEFFGKFESIKYNISKNYFEFKLTNYTAFNPKADGTRQNWTVCSYGERILTFRNKDKNSQWDNKEVKPTDGFKKLFDDNEIVYMNGQNIKDFILVKDEKAFFEVLLGCFKLTLQMRNSVTNSDIDYLISPVCDKNGIFYDSRAVEDSLPKDADANGAYNIARKGLWVIEQIKKVDDLRKIKLAISNKEWLSYVQTNDNYK

SEQ ID NO: 6343 - protein, 1239 aa, unidentified
  source 1..1239: note = MG29-18 effector
MAENKAIFDGFANKYSLQKTLRFGLIPDSESKKWIEKNLVIEKDEKLAEEYKKAKKIIDKVHKAFIESALEKLKLNEKALTAFEKETAKTKKERDKKTIEKIQASLRNEVADSFNKDKEEFKAMFSEKMIKENAPRFCNTAEEKATMKLFDNFTTYFKEFHKNRKNIYSNEAKATSIAFRIVHENLVTFVDNLRIFAKIREGGLDLDKAEYELKSILGKEKIEKLFSIEYFNKVLSQSGIDFYNRIIGGEFEEGSRKKIRGLNELINLHNQKERGKLPRFKQLKKQILSDRKKSLDFGFLDDSELLQAIEEFYLKELSDENGKRTPEMLRALFERAEEFDIEKIHLRNDSTLRELSNKLFGDWSAIENALSEHYEKENPSKDTKKYEKDKEKWLKQDQFPIATIETALSLYEHEKVDKGKCKGLFFRQFSSFKKEEDDKENLLERLEISYNRAKPILENKSPGNRLASDEQAKGKLKALLDALIDILHFVKSLRLKDAAISDKDYSFYGEFDPLFERLDGIVGIYNKTRNYLTKKPYSTEKIKLNFENSVLLGGWDRNIEDTKGGVIFRKDGQFYLGIINKNNKTILKNPPKAKDGEVAFEKMFYKLIPNPARDLHHTILSKKRSAKYKPTKTLLEKYEQKKHIKGDNFDKKFCHELIDFFKESIKKNPDWETFNFKFSETSSYEDISGFYREVGRQGYKVVFERIPASYIETLVKEGKLYLFKIWSKDFSKDSKGTPNMHTLYWRALFDEKNLKEPIYKLNGEAEMFFRKRSVEPKITHPAGKPIPNKNPDNLKKESVFKYDLIKDRRYSLDKFQFHVPITTNFGSEGQEFIDYDVRDAIKKSPVRIIGIDRGERNLLYLSMIDENGKILLQESLNKITSLYGGGKKTTDYNSLLARSEAGRDEARRDWKKIENIKEIKEGYLSQAVHKIATLMVENEAIVVMEDLNSGFKRGRTKVEKQVYQKFERMLIEKLNYLVFKKRSPEEAGGLRNALQLTSKFKSFEKLGKQSGFLFYIPAAMTSKIDPVTGFANELNPKYESVGKSKEFFSKFERISYNSKKNWFEFSFDYSNFKTKDGLEGKWVVCSTPHERFYRNGGAKGGAKGETLPMNANEELKKLFGEFGIEYSTGDCLKKEIVSKDSKEFFKKLTRVLASILSLRQNNGKTGQDEQDYILSPVEPFFCSLDGKDGLPKDADANGAYNIARKGLLAVRQIRSAEDPKKARLAIRNKEWLEFAQAMK

SEQ ID NO: 6344 - protein, 1290 aa, unidentified
  source 1..1290: note = MG29-20 effector
MQQMNTENIWGGLTNQYSLSKTLRFELKPVGFDGEELVIDESLNSIEKIIEEDKQRNEDFKIVKKIADEYFKEFIERSLKFTKISKTKLEEFENIYLEFIRDKQNKNKRDNFDKLNKELRKNLKELVKLKFKDEFSTFFKKEFYEKVLPLWLDKRNRIEDKKLVEKFKGFTTYFTGFNSNRENVFSENNIPTSIFYRIVDDNLPKYLANYDKFKKILEVSNDKFGELQVELKDELEGLTLLEFLSIQNYNLFLNQSGIEKYNKRIIGKINSRINELIQRDKDLTREQIKILKKSKLQVLFNQILSDKESLFTFDKFNSDYEVLTKIDEFYNNLNSKNQFDEFSNLFENLDSENFDLSLIKIKNGKFISDISQNIFGDYNVIKEDLKREYIKSRNYDIEKLNKKQQEEIEKYLKTDYFCFKEIQNSISRIKETRDDSDEIITLFDFFKDFKFSVEHKSIDLLKNIEDSYKSFNSIKFEEFKNESQKKLTQDKYNEVVNVIKEFLDALQNYYHFVKLLKFENEYRDEHFYQIYDELLNLISQITPLYNKVRNYISQKPFSTQKFKLNFQSSSFLNGWDSNFETKSAVILKKKINNKTNYYIAISPKKIENNENDFSVNKGNFEILNYDFQKPDNKNIPRLFIRSKGDNFSPNVEKYNLPVQEIIEIYDKGYFKTEFRKTNFSKFKESLVKLIDYFKLGFQRHESYKHFKFNWKESREYEDISQFYFDVESSCYQLNFKKINEEYIKQLVEENKLYLFQIYNKDFSQNKIKKENYNSKKNLHTMYFEELFSEENLEDVVFKLNGQAEIFYREKSIEYKPTHPKNLPTKNKDPINGKEESLFSYDIGKNKRYTQDKVLFHVPITLNFKSNSRVRINNEVNKVIKQNSKNINILSLDRGERHLLYYTLLDTKGNIKEKGSFNLINDSFNRKVNYHQKLSKLEKERDEKRKSWQNISTIKELKEGFLSQIIHKISKIAVENNAIIVLEDLNYGFKRGRFKVEKQVYEKFEKMLISKLNFLVFKDKKNDEIGGNLKAYQLTPEVNVLKDIGKQTGILFYIDPYLTSKICPKTAFVNRLYPKYENESQAKDFINKFDSIRYLKDEDLFEFSFKYSSFGVKDLVKDDWKIYSNGIKLVQSRDKNQNNNWTTKSVNVNEELKKLFNDFNIKIEESQNLIDDIVKQNKFFLENIIKNLKLILQLRNSYTDNELKINKITEKEGDYILSCVKNKKGYFFDSRNANKEEVDNADCNGAYHIGLKGLMVLNKIKEFEDIEKIKFNDLKIERNEFLNEMIRRNWS

SEQ ID NO: 6345 - protein, 1240 aa, unidentified
  source 1..1240: note = MG29-21 effector
MSTLATQFTGKFPLSKTIRFELIPRFGTKELLNGLFDSDYKRAELAPTVKEILNMYYQDFINICLEDANLQNVKIKGISALDYAFDAYKNNDSKKVTTANTALMTYISKCFTDKNKFGLDEYLNLLKLEKKKSPTILVKWINEKVNKGIFSKEKAAEYKNAISFFDKFITYFSGFKKTKENMFKPEDKASSIAHRTISENLYRFFDNILLFNKISEKYPDLAKELLPFKDAFTIQYFATRINQNAIDEYNHNIIGSSSENIDHNGVNSILNAYRQKHHLRTKDIPVMSRLYKQILSDSEEKFFFLQVTSKEQALALINDTTLSLKTSCKKLQDLFSTYVIEDNSSHIYLKTSQLHTISMSLYNRWDLFDVAIKDKASTLSTKDSNQLLAKYKDVISIQELNNIFFNYYQSLDKDKQKEIGPIRNLTEYFQRAPKINISIDELKEKSITEFKTQLDTLLGPTHFYKAFHLYNGRKAISVPDRDISFYNEFEAAYRQLACASTTYDAIRNFATKKQYSLDKIPVFFGKSSLLISWENGYNAKSCLLFQQGNNYYLGILNKKLDETDIKKLHTDAIADPATRFIINSQKVDNKNVPRLFIHSKGDNLAPSVKKYNLPIQNILNLYTQGYYKTDYAKINPKKFKASLIKLIDYFKLGFSQHEDFKNFTFQWKESEEYNNINEFYHDVAVSCYAISKEHVNFSALKSLVKENKLYLFQIYNKDFSTHSHGTPNLHTLYWKALFDDRNNLNKVFKLNGGATIYLRKGSIAKKITHPKNQPIESKNPLHKKQSVFGYDLIKDKRFTEDKLFLHCPITINFKYPANIYLNNDVNNYLENHPEVNIIGIDRGERHLLYYTIIDQKGNILEQDTFNQIKYAYLDKKSNETVPVVVDYHTLLDNKQIQRTDARKAWETIENIKELKAGFLSQVIHQLAELVIKYNAIVVLENLNTRFKQTRVKVEKQVYQKFEKALIEKLNYLVFKDHQYDDLGSYAKGYQLTNPSDINQSGISQNGILFYIVPSYTSHICPKTGFVNLLTGKLHYKNIEASQEILKNFDGIKFNLANDYFEFKLDYRKFNIEMSQPCWTICTYGDERYAYTRTENNKTQVAKINVTQELKELFTKYEIDYTKGNNLLAKILELNDKSFFSSLLFLLNLTMQIRYTKPGTQDDCDYILSPIQYAKKSFFDSRFAQNNEPKNADANGAYNIALKGLKLICSIKDGALPKQEKGTERKEWFEFVQKKLYLDKD

SEQ ID NO: 6346 - protein, 1248 aa, unidentified
  source 1..1248: note = MG29-23 effector
MKDFTNCYQLSKTLRFELKPIGKTFDFIQEKGLLKQDEQRAESYKKVKKLIDEYHKAFIEKCLETVFIPNKDIIEFESLFFKQEKDDKDKKELENLQKNLRTIIADSFRKSDNFKRLFGKELIKEDLLEFFKNEEELTLVGEFKDFTTYFIGFNENRKNMYDSDEKSTAIAYRLIHENLPKFLANKRTFDKIKTNYPKIIEDAKTIIEPELFGIPLEDMFSYKYVNQTFKQSDISLYNLMLGGKSDGNEKKQGLNELINLYRQTNELSKKDIPNLNVLYKQILSDRETFSFVSEKFENQNELLQSIQSFYTEQLLEWNNNDTTENVFLKLIQIIKEHENYDKSKMFLKNDIFITHISKQLFNDWSVIPTALKEQFYNTNPKLKQTETNDKKFEKIKFYSFFEIESALKDYCQDKDDFKGLYKDDILFSYFNNFKLKDKDNTLIENINQKYEEVETLLKTDYPENKSLISDDESIKKIKIFLDTLMDFLHFIKPLTAKGFIGEKEDAFYADFNVYFEQFENVTKIYDKVRNYLTQKPYSIEKYKLNFENSTLLDGWDQNKETANTSILFKKNGLYYLGVIDKKHNKVFENLIPENTDNYFEKIVYKLLPGASKMLPKVFFSSKNINYYCPDENILKIRNHGTHTKNGEPQKGYNKLDFNIIDCRNMVDFYKKSIEIHKDWKNFGFQFSPTDNYNSIDEFYREVENQGYTIAYQKISKKYIDELVNQGKLYLFQIYNKDFSPYSKGKPNLHTLYWKELFSDENLKDVVYKLNGQAEIFFRQKSLQYTDETLKKGHHYDKLKDKFDYPIISKKRFAFDKFQFHVPITLNFKAKGRDNINQNVLEYLKKTPKNDIHIIGIDRGERHLLYLSLIDINGNIKKQYTLNDIVNQYQGKTFATNYHNLLSEKEKSRADGRKEWKTIETIKELKEGYISQVVHQVAKMIVEHNAILIMEDLNFGFKKGRFKVEKQVYQKFEKMLIEKLNFYVDKNKKKTELGGTLKALQLTSKFTSFREMGKQSGFIFYVPAWNTSKIDPVTGFVNYFYSKYENIKKAQEFFIRFSNISWNNDKNFFEFVVNNYTAFNPKAEGTRQDWVICTQGIRLENFRNQEKNNEWDTKEIDLNNDFKALFNKFKIDFSHDLQAQIVNQTEKTFFENLYHLFRLTLQMRNSRTGTDEDYLISPIANDKGIFYDSRNYEKQENPVLPKDADANGAYNIARKGIILLDKIKKADLSKKVDLSQNNRDWLNFAQKIK

SEQ ID NO: 6347 - protein, 812 aa, unidentified
  source 1..812: note = MG29-24 effector
FKQTACIKQFLDSSRNLWAFVKDWNMEIKEIPEDAFTDWYDCIQNFVDNFPVINLYNKTRNHLTQKAYSKDKVKINFEKSTLLNGWDRNKESANFSIILERDGLFYLAVMTPGNNDIFGYDEIPGEIGKKKEKKENLRKLALAGKGENCYRKMNYKQIANVGKDIFTLCWDNKENIAIRKTKGREKIWGNQITRIKETKSYSDNTEDRLVYFSYLIRCAKSYWKHFNLQLKRPEEYKTMQELLTCIGNQGYKISFDNIKESYIEENVDKGNLYLFQIYNKDFSRNKKAGGKDNLHTSYWKLLFDEDNLKDNVLKLNGQAEIFFRQASVKWSEEKMKKGHHYEKLKDKFDYPIIKDRRFTQDKFFFHCPITLNNKAPSNPARFNSTVRNFLKKNPEVNVIGIDRGEKHLLYYSVVDRQGNIIEQNSFNTISTGFKPAGQSQEQKIDYRRLLDEKEKNRDKARKSWSAIENIKELKAGYLSQVVHKLAQLIINYNAIVVLEDLNYGFKRGRFKVEKQVYQKFERALIDKLNYLVFKDRENRLQPGHYLNAYQLTNKFESFKKLGSQSGILFYTAASYTSTTDPVSGFMKNVYYTYSSIDKAVEFWKSFDSIIYNAEQNRIEFTYTLEKIMSKKLEKEKDEKSVEKTSWTVVSSVQRSKYIKKDRKTEILDVNTELKKLLDSNRIEYKDGADLRNRLAERNERGDASFHKSMVYYFNSILNIRASNPQAETGTGENDFIMSPVEPFFDSRKKYPGLPLDGDANGAYNIARKGIFMLNTLNNSENPEKENLNVSKKDWQNFAQADETVKRQKAKMK

SEQ ID NO: 6348 - protein, 829 aa, unidentified
  source 1..829: note = MG29-25 effector
MLKEFVGKYSLSKTLRFELKPVGKTIEHIEQKGLISTDEARAEDYKKAKELIDEYHKEFIHQALSSVRLIGLDSYEVLFLKQNRDEKDQKEFEKIQDDLRKQIVAGFKNHPHFKNIDKKELIKDDLPRFLQNQEDRDLIERFSSFTTYFTGFHENRKNIYSSEAKHSSIGYRVIHENLPIFLTNKKAFLAINSNYPQIAQEAQSSLLEHLNGGIVEDMFANDYFSFTLIQTYIDIYNTMLGGKTLADGTKIQGLNELINLYRQKHNIDKRELPNLKPLYKQILSDRDGMSWIPEAFECREDLNLAIQTFYNKNIVAFECCDGVVDITEKFLEVLTQTSSYDREKIFIKNDLSLTAISHVLCEDYRVIKDALWQKHLQENPKAIKSKDIAGDEERFFGRKNSYFSISEIAKALDLIEKPSDLFGYFKTEVEKQSKQVKSSFKEWELDPNNKKLTKEFLDSTLDLQRTLKPLYVRSDIDKDIAFYALFDGYFDSLSAIVKLYDKVRNFESKKPYSTEKFKLNFENKGAFLGGWVDSYTDKSDNGTQSGGYLFRKKNAIGEYDYYLGISKDTKLFRSHLQNDIDENDISEYERLDYYQLKTASVFGNSYVDGSYSEDKIEIKNSIYNFVKSTDLGKELEDYISSKEAKEATPNKMINYIKEKNPTLYEELLEDEEFSKINKTVTKKLKETILSLHRVPKSQEYKEASFNLFTEPIEAIEKLSEEKTFVYFSISSREFENALANKDKPLLLFKITNKDLSYAETFLNGKRKSRGLDNLHTLYFKALMSGEQAVFDIGTGEVFYRKKSIEYSEEKMQKGHHYDKLKEKFSYPII

SEQ ID NO: 6349 - protein, 1309 aa, unidentified
  source 1..1309: note = MG29-26 effector
MKLNKFTHQYPISKTLRFELKPVGETADYIEDFKSQYLKDIVIQDQQRAEDYESIKVIIDEYHRHYIEEKLSEPFDKKTGELFISGDEFENAFSYYQRFRENSKDEKARKEWIEVQNSLRKSLVKVFSDRKKRLFQKELITKELPSWLKEKGEWEDKKNVVENFNRFTTYFTGFNENRENMYSHEEQSTAISFRLMNENLPKYFNNCIQYHKAIESYDGLSFTVNPDLLNEMGVSILSEIFQPSYYIQLFTQSGIDKFTELLGGFTKENGEKVQGLNETINLFRQQKAIKAKAFPNFISLYKQILSDRETSSFIPDQFENDNDLLKSLGKFIKEMVKEDGLFKKLEDSIKLITDADLHRTFIKNGVEITKISQSIFGNYSILKSAIYHHAESVLYPDPISGKISEALKEKRIKYVNKQVVFSIAELETILSNYASQMTDDNPDKEIIAQCENSEHPIRTYFLNAIENVKNDKDIEFGKAIENVLPLISLENLNKGKDGQAQTHKIQKMLDAFLAVTHAVKPLHLVKGRKPIDIPDMDMGFYAEFSKAFENFEQLVITLYNKTRNHLTKKTFSTDKIKINFENPTLLDGWDANKEKDNSGVLFEKDGNYYLGIMHPKHKNIFNYIKGINDIESEKRSLSKDELFNKIVDGESEHYQKIVYKLLPGVNKMLPKVFFSGRRIDFFAPSTEVLKIRNSASHSKNGSPQKGFEKEDFNLKDCHTIIDFFKKSIEKHPEWKEFEFEFSPTSSYEDLSGFYREVEHQGYKMDFHPIKKSYIDQCIEEGKLFLFQIYNKDFSPYSKGKPNLHTLYWKALFDTENLKDVVAKLNGQAEIFYRKHSIKKDERTIHRANKSLQNKNENNPKKTSLFEYDIIKDRRYTVDKFQFHVPITLNFKMEKMTQFAHNEKVNQMIVKSENTHVIGIDRGERHLLYYSVINPKGHIVEQGTLNTISTDKGYEVDYQQKLDSKEKARDTARKSWTTVENIKELKAGYLSHVIHKIAFLIEKYNAIVCLEDLNFGFKRGRFKVEKQVYQKFEKALIDKLNYLVFKDAKPNEPGHVLNAFQLTAPFDSFKKLGKQTGLLYYVQASYTSKIDPVSGFINFLYPKYESLLKSKIFFESMDGIRYNADKDYFEFSFDYRKMTPNRNLEGYQTKWTACTFGEKRFKNIRNAHGNWESVEVNVTEALKKILKNEDVDFKSGHDLRFEISKVKSTKFYKKLFKLLQITLSLRHSKTGTDEDFILSPIVDENGKFFDSRNAPKDQPMDADGNGAYHIALKGLWNLEQIRNWDGESRLNLAMKNVDWFSFAYQKPFKK

SEQ ID NO: 6350 - protein, 1257 aa, unidentified
  source 1..1257: note = MG29-27 effector
MINSSKSIWDGFVNKYSLSKTLRFELQPISRTLDFIKEKGLIEQDKEREKEFNLVKKIIDSYYIEFIENVLSKITIDSDLLKEYSAVYKNLKNDKYSSDLKKEFKLIQDKVRSEVYKQIYNFPNFKLLFGKELIKVILPKWLEYKNRLEDKELILKFDKWTTYFVGFFENRKNVFSKDPIPTSVIYRIVHDNLPKFLDNIEKFNKIKLLDNFDYFSIEKELSVELNNKNLDYYFNLSNFNLFLNQRGIELFNTIIGGKSTENIKIKGLNELINLYSQKEKDLIKSKNIRKLKMSPLFKQILSEKQSFSDKFDLIKDNSSLITQINTFYTDEFNTNLPKILELISKLDQYDLDQIYINKNSITNISSNIFKDWSIISSGLKEYFIKNYNLSNKKIESRLNQKYFSISEIQEGVKLLNLDRINYNDFSDHFISDYFKNLINEKIIDEITNHKLDFDKINYNNLNSFSDNEKQLIKILLDSILGFYNSIKPLYVNIKSSQEEKTQEAYELDSDFYNDFQIIIDSFKKIIPIYNKTRNYLTKKPYTTKKFKLNFDNSTLLDGWDINKEKDNYSLLFKKDNQYYLGICSKGNSTDISKYIQKKVFNSGDYFEKIDYKLLPGPYKMLPKVFFSKTNIEYFSPSEEIISIRNYASYSKNGTPQKDFDKEEFNITDCHKLINFYKFSLNKHHEWKNFNFNFKPTDQYKDINEFYQDVEDQGYNLSFKNIDSKYILDLVDSGKLFLFKIYNKDFSKFSKRTPNLHTIYWNELFSEENLSKLIYKLNGKAEIFFREKSNIKNNTIHGKNQLIQNKNPINNKTESIFEYDIIKDKRYTQDKFLFHCPITINFKSRGNGKDIHKQINNYIKDFEGNINILSIDRGERHLLYYTLLNSDGKIISQNSFNNISDGFNRSFDYQDKLDQREKERDQSRKSWTAIENIKYLKEGYLSRVIHEIAKIAIENNAIIVLEDLNFGFKRGRFKIEKQIYQKFEKMLIDKFNFLIFKKRSKESIGGALNGYQLTNKFESFSKLGKQSGILFYVPASYTSKIDPTTGFFDLIRPKYESVDKSIQLIKKFEYIKYNSDMDMFEFNYNYFNFNNELKLDRKNWCIYSNGSRLYNFRNKDKNNEWDTKEINLTKELKDLFESYSIDYNSTQNLIDRIILIDHKDFFEKLIYILKLMLQLRNSIPNSKEDYILSCVKNKDGLFYDTRKNMTSKSLPVNADSNGAYNIGIKGIMIIDKIKNNLEIKITKEEYVNFIINKNDYGK

SEQ ID NO: 6351 - protein, 1261 aa, unidentified
  source 1..1261: note = MG29-28 effector
MKNLSEFTNLYSLSKTLRFELRPVGETAERIEDFKNKALCDVVRRDEKRALEYVKMKKILDDYYRDFISYVLDQKIFTERDIKDAFEVYKKTRQPTQDRDKQKKEFQTVQKKLRDKTAKAFNERLKEKGLDEYSSLINTKGKDDKLKKPLLWHWLKKKYDGKLLSKEEFEDAEKTLKSFDKFTTYFKGLKQNRDNMFSKKDQRTAISYRLINENMIKHFDNCMRLENIKKNHKSLYNEIKESANSLKPDSFMIFLNQTGIDNYNRIIGGDSIDQNKTGVNQKINLYRQKHNIKGKDLPLMAKLYKQILSKTEDKFVIDKFESHKDMLDTIDEYMCNILDSKNIRAISSFIENHITPENMEYIFIKNDTTLTDISQFMFKDWGFIKRAMTKYSENEISGKKEREKWLKSDIFSLKDIQTSIDKYLVDLEEKDFTQTDIGLFFKSFINADGNIFDKINESRKEAEPVIRSGEFNVNNERPDNKTDTDKIKNLLDSIMKLIHFLKPFHLVKKGKPIETDNADSDFYEPFNNSYNDLCLLIPVYNKTRNLLTQKPYSTDKIKINFDKGTLLDGWDVNKETDNLSAILLREGKYYLAVMDKSSNMILTKENTSGFDLKNEDCYLKMNYKLLPNPSKMLPKVFFAEKNIEYFAPGDDIIRIRDKGLYKKEADDIESVHIWIDFCKESIKRHEEWNNYFNFNFRPTKKYSDVSGFYNEVAEQGYALTYTPVSAKYIDDKVSKGELYLFEIYNKDLSIKKKNINGTPNLHTLYWKAIFNEDNLKDVVVKLNGEAEIFFRHASIDANSRVVHKAGTALYSKNPLNKKNSTFEYDIIKDRRFSKDKFFFHCPITLNFKAQGEKRFNERVNRFLENNDDIKFIGIDRGERHLLYYSVIDGRGRIIEQDTFNVLKNSYESNGSIVEKKTDYRDLLDRKEKERDEARKKWSAIENIKELKSGYLSHIIHELAKLMIKHNAVIVLEDLNFGFKKGRFKIEKQVYQKFEKALIEKLNYLVFKNEKPGNAGYVLKAYQLTDEFESFDKLGKQSGFLFYVPAGYTSKIDPATGFVNLFNTYYENIDKSKEFFGKFDSIRYNKDRDYFEFAFDYKKFTDRSGGKTKWTVCSFGNERYYYDARSRSYVCHDITRNLKLLFGHLKYENGENIIEKILEQTEAGFFKSLYFNLKVLFSLRYTGKDDKGNEFDYILSPVGNFFDSRKADENMPLDADANGAYHIALKGMMTVKGIRDGKLPKTEKGMMNKEWFAFVQERNMKN

SEQ ID NO: 6352 - protein, 1251 aa, unidentified
  source 1..1251: note = MG29-29 effector
MSAQSALSTLINKYSLSKTLRFELIPIGKTKESIDRKGLLSQDVKRAQSYKEVKKIIDEYHKEFIEKSLINAKLKGLEEFSKLYYKLQKEDKDKKNIKKMQDNLREQISDLFKNNKKDKWNILFKEDLIKKELPLFAKDDKQKNLINEFNKFTTYFTGFHKNRKNMYAEEEKSTSIPYRIIHQNLPKFLDNIRIFEKIKKNKINTDVIEKELSLFLNGIKINDIFSINFFNDVLNQKGITFYNTILGGVSEKDRTKIKGINEYVNTEYNQKQLDKKSKIPKLKQLYKQILSDTETASFVLEQFENDNQLLEKIEQFYNTELINYETEGKTQSVFLQFEQLFKNMQNYDASKIYISNLSIANISKIIFGDWSIICNALAEWYDKHNTKGKKINEYKKENFLKQDFSIQQIEDAVLEYKNDTLNKEINFLLNYFASFLNEKSKKNIIQRIETEYSKVKDLLNTDYPEKKKLASDKDNVSKIKAFLDSLMDFLHFVKPFNIKKDTGLEKEENFYSIYVPLFEQIDKIIPLYNKVRNYLTKKPYSTEKIKLNFENSTLLDGWDLNKESDNTSVVLRKDDLYYLGIMDKKHNRIFKELPSQNGNESSYEKMIYKLLPGPNKMLPKVFFSKKGKKQFKPSKKLLKKYEDGTHLKGDNFNINDCHNLIDFFKESIAEHEDWKQFDFKFSSTSSYKDLSNFYKEVEKQGYKITFQNISENYINQLIDEGKLYLFQIYNKDFSKYNKGTPNLHTLYWKMLFDNDNLKNIVYKLNGKAEVFYRKSSLILGDNIVHKAGEAIINKNPDNEKKHSTFDYDLIKDKRFTLDKFQFHVPITLNFKSEGRQNLNEDVRKFLKNNPDINIIGIDRGERHLLYLTLINQKGKILFQKSLNEITNEYNNKNGKSQIKSTNYHSLLDKKEKKRDEARKNWGIIENIKELKEGYMSQIVHYISKLMIEKNAILSLEDLNFGFKRGRQKVEKQVYQKFEKMMIDKLNYLVFKDKKANETGGLLNALQLTNKFESFAKLYNQSGFIFYVPAWNTSKIDPITGFVNLLKPYYENLNKSQEFFKKFNNIKYNPKQEYFEFNFDYKNFTNKAEGSKNVWEICTTNNERFMWDKTLNSGKGAQKAVDVTQELKKLFDSSKINYLNGNDIKEDIINQNSADFFRKLMKLLSVVLSLRHNNGLKGKDEKDFILSPVEPFFNSLNAKMEEPKDADANGAYNIALKGLLILKQINESEDLRKIKFNLSNKEWLKFAQSKSF

SEQ ID NO: 6353 - protein, 1265 aa, unidentified
  source 1..1265: note = MG29-30 effector
MQECRNNCRRLMALFDFEDIKGEKLMALIADEFLGQYSLSKTLKFELVPQGKTKDLIKNINDSILAIDAKRAAEYKNVKKILDDYYRFFIEQVLEKNIFEKSEVEEAYIAFQQRAKDNKAFEKTQDNMRKKIAKALKDGRSGSQLDAYEKLFKTDDKSELYKWLNYGKDRKELTEELYESYKKSLQQFDKFTTYFTGYKDNRENLFSAEEKSSAISYRIVNENMVRFFENCQRFDDIKKKHAGLYEQLEVNQAIFQYNKFSELLGQSKIDEYNQMIGFSIENSDTKGINSLINEYRQKNHIRNKELPMMVQLYKQLLSDREKSFVIDEITSDEEMEEKAIECCREAREIEKKLALLVKEYVNEDNTVRIYLRGSKLTDLSQNIYGQWDIINKALLMRLESLTTKKQREEFDKRTKKVININELQGILQEYLAGLDSEEYKKIQDKVTISELIVENIPAVEYSPVLNGLRFGSKEEKINKIKGVVDQIISMLHYYKIFYLYEGNKQLEVAEKDAFFYSEFDALYNALSLATKVYDHVRNYVTKKPYSENKIKVNFNAPTLLNGWDINKEESNLSVLLEKNGLYYLAIMDTNHRKCFDLKDIAVAKAAFSDVNGAYFNKIEYKQVTGANKMLPKVFFAESNIDYYAPSSEIRTIREKGLYKKDANNIEARWQWIEFCKQSITKHPEWNNYFKFNFKPTKNYMDVNGFYRDFDNQAYSIKKVRISEKYISDLVAAGQLYLFQIYNKDFSQYSKGKQNLHTMYWRMLFDSQNLKNIELNANAKIFKLNGEAEIFFRRQSLEKKITHAKDMSIANKNPHNPKKQSTFEYDLIKDKRYTENKLFFHCPITINFRASSLPAQFNKKVNKFVANNPDINIIGIDRGERHLLYFTIINQNGEILKQGSLNHIKDNYISNGKEVPIDTDYHELLDRKEKERDAARKNWTAIENIKELKAGYLSQVVHQLAELMIKYNAIVVLENLNAGFKNGRVKVEKQVYQNFEKALINKLNYLVFKDCSLNKPGGVLNGYQLTAPFDSFRSLGSQSGFLYYVYPSYTSHICPKTGFVDLLHPKHQSVAEAQKFFEKFEFVRFNQDKQYFEFGLDYNRFGKQMNKNRWVVCTYGEERYGFDGKEMTAKKYNITEEIRALLDKAKIVYDNGCDIKNAICTQDDKSFFKSLLYYLCLTMQMRNTNGGTNDDNDYILSPVRDKNGNFFDSREATDTEPKNADANGAYHIALKGLKLISSIDEEGKLVLKKTETQDWFNFAQEKPYLK

SEQ ID NO: 6354 - protein, 741 aa, unidentified
  source 1..741: note = MG29-31 effector
DSISDKDDAFYSQFAPLYEQLNKLIPLYNMVRNYLTQKLYCTDKIKLNFENSTLLDGWDVNKEPDNTSVILRKDGLYYLVIMDKAGKKVFMDVPKIAYSGTFYEKMNYKLLPLVNQQLPRVFFAKSRIEFFKPSEAIQENYKKETHKKGDTFNIKDCHALIDFFKASLAKHEDWKHFNFKFSPTKSYQDLSGFYREVEHQGYKMSFENIPTDYIDKMIEEGKIYLFQIYNKDFSAFSKGLPNMHTLYWKALFDENNLADVVYKLNGQAEVFFRKSSIEEKNKVIHKAHELLKSKNPNTPNNNNTFDYDLIKDRRYTVDKFQFHVPININFKASGSEIINAQTNDFLKNNRDVKIIGLDRGERNLIYLTLIDQKGNIIIQESLNTISNKERKIETPYHTLLNIKEKERDAARKSWNTIENIKELKEGYISQVVHKIAEMMVKHHAIVVMEDLNFGFKRGRFKVEKQVYQKLEKMLIDKLNYLVFKDAQPTQPGGLLNALQLTNKFESFKKMGKQSGFLYYVPAWNTSKIDPATGFVDFLKPKYENVEKAKAFFSKFDSIKYNTVKDYFEFAFDYKNFTTKAEGSKTDWIVCTHGDLRFRYNAQTKESEAVNVSQEIKKALKKHEITFEQGKDFKNLLIAKEGKEIFSALLHLLALTLSLRQTKSGSEIDFILSPVTNRKGVFFDTRNADEKMPIDADANGAYHIALKGLWCLKQISQSDDMKKVKLAISNKEWLEFVQNKRF

SEQ ID NO: 6355 - protein, 773 aa, unidentified
  source 1..773: note = MG29-32 effector
MFTNLYPTSKTLRFSLIPHGDTLNNIEKAGILTEDEKLAEDFKKVKKIADDWLKNFINESLAGVSLSLENLLIYEEKYNLFPRNEKDEEEFNDIKTKLRKEVVSYLAKNPKFKLLGSADLIRKELPEFAKTEEEKNLINKFKTFTTYFVNYYKTRENIYSAEEKHASHAYRVINENLPLFITNKKNFDIIKNSYPELIEDIKKSVEPLLNGEKVEDMFSTEWFSKTLTQSGIDLYNKMIGGESLEDGKKIQGFNEKVNLFRQANKLDGKSVPMLKQLKKQILGDKNVPAWITEGFKNKDSMNNAIVEFMDNIKPVLSTAADAFVTEESHDYNKIFIKSRFLTDLSHELFKDWNFLKNILLEKYTAKNPKSKNPEKEFAKISYFSIAEIQAILPNLSKDFIFKFLYNKTINIVAEIRQSYELWNTNQKNVPVLKSLMDNIIQLHRTFKPFDIDEADKDPVFYELFDRIFEGIDGAVKLYNEVRNFITKKPYSLEKIKLNFGNSTLLAGWDVNKESDNSSILLRKGNDYYLAIMNKSHNKVFKNAPLVKNNEESYKKMEYKLLPKSYMMLPKVFFSEGNKHKYEPSDEIMRIYENGTFKAGDNFNADDLHALIDFYKDSIEKNPEWACYKFNFRPTEEYQKINEFYDDVDSQGYVITFRDIKASYIDELVKDGKLYLFKIYNKDFSVYSKGTSNLHTLYFKMLFDERNLKDTVYKLNGGAEMFYRKKSLNYSEEIMKNGHHVEELKGKFDYAIIKDRRFAFDKFQFNVPITLNPN

SEQ ID NO: 6356 - protein, 1314 aa, unidentified
  source 1..1314: note = MG29-33 effector
MSKIYQQFTRLYKIQKTLRFGLKPVGETANAIDDFKSQYLQDVVQEDGQRAEDYKVVKDLIDDYHRVYIEEKLSQPVDRATGEMWVTPEHLEAAYYDYQNLKNNDPKDNKIKKAWAETQKSLRKQLVKSFSDNSDLFRKKLITRDLPAFLKGQGKWDENEKAVKSFNKFTTYFKGFHENRKNMYSDEDQSTAIAYRVMNENLPKFFNNYLSYQKIKDKLKFSVEKELFTKMGISGIGDIFQPRYFIKLFTQSGLDNHQELLGGKTNEDGRKIQGLNEQINLYNQQQSDRQNKLPRFTSLYKQILSDREAHSFIPEVFKDDQELLKTLQGYIEKATKKEGLLDNLEKSIALLSTADNEKVYVKTVGLTDISSALFGSYDIIGAALSHHAENTAHQNHTKKPASKTLIKKRESFCKQDVFSTAKLDEMITAYIAQLEKTDPLHQQLKKLKTPKRPIQIYFLEAFQQAKKEYGFDACIKNITPLLSLESLSKKRQAPTSEGEQGDKGYQQLHSIQKMLDAFMAISYKLKPLHLVKGRKAIDMPDMDMRFYTKFSESYEDYSDTIINLYNKARNHLTKKPFSKDKIKLNFGNPTLLDGWDANKETDNSSLIFEKDGFYYLGIMHPKHKDLLNYITGIDDIGNDKKTKKKELLKKNIEANKNEQHYRKIVYKLLPGANKMLPKVFFSGKRQDYFSPSSEILRIRNSASHSKNGNPQEGHAKAEFNIDDCRKIIDFFKVSISKHPEWRAFDFQFSPTQNYQDLSDFYREVEQQAYRVDFDLIKQSYIDECIIKGKLFLFQIYNKDFSPYSKGKPNLHTLYWKGLFDPENLKDVVLKLNGEAEVFYRPSSINVADRTIHRANEAIDNKNKEFHRKSTSTFAYDIIKDRRYTQDKFQFHVPITLNFKDQGKPHFNDKVNLKLRNTKDTHVIGIDRGERHLLYYTVVNSKGEIIEQDTLNNISTDQGYAIDYQNKLHKREKERDAARKSWSNIENIKELKAGYLSHVVHKLAELIIKHNAIVCLEDLNFGFKRGRFSVEKQVYQKFEKALIDKLNYLVFKNSTLQKPGHYLNAYQLTAPFESFEKLGKQSGILFYVQAAYTSKIDPSTGFIDFLKPKYKSLSASKEFFETMSSVTFNKAKDYFEFSFDYKKFNPSQKFGSYTTAWKACSFGKIRYHNKRNNKGKWETCSINVTEELKKLFDNADIQYQTGQELKESLSLVKDTKFYKTLFWLLRLLLSLRHSKTGTDDDFILSPIADKNGDFFDSREAKDGKPKDADANGAYNIALKGLWNLQQIKQWDGKSSLNLAMKNEDWFSFIHDWHNQ

SEQ ID NO: 6357 - protein, 999 aa, unidentified
  source 1..999: note = MG29-34 effector
SSFIPDQFENDNDLLKSLGKFIKEMVKEDGLFKKLEDSIKLITDADLHRTFIKNGVEITKISQSIFGNYSILKSAIYHHAESVLYPDPISGKISEALKEKRIKYVNKQVVFSIAELETILSNYASQMTDDNPDKEIIAQCENSEHPIRTYFLNAIENVKNDKDIEFGKAIENVLPLISLENLNKGKDGQAQTHKIQKMLDAFLAVTHAVKPLHLVKGRKPIDIPDMDMGFYAEFSKAFENFEQLVITLYNKTRNHLTKKTFSTDKIKINFENPTLLDGWDANKEKDNSGVLFEKDGNYYLGIMHPKHKNIFNYIKGINDIESEKRSLSKDELFNKIVDGESEHYQKIVYKLLPGVNKMLPKVFFSGRRIDFFAPSTEVLKIRNSASHSKNGSQQKGFEKEDFNLKDCHTIIDFFKKSIEKHPEWKEFEFEFSPTSSYEDLSGFYREVEHQGYKMDFHPIKKSYIDQCIEEGKLFLFQIYNKDFSPYSKGKPNLHTLYWKALFDTENLKDVVAKLNGQAEIFYRKHSIKKDERTIHRANKSLQNKNENNPKKTSLFEYDIIKDRRYTVDKFQFHVPITLNFKMEKMTQFAHNEKVNQMIVKSENTHVIGIDRGERHLLYYSVINPKGHIVEQGTLNTISTDKGYEVDYQQKLDSKEKARDTARKSWTTVENIKELKAGYLSHVIHKIAFLIEKYNAIVCLEDLNFGFKRGRFKVEKQVYQKFEKALIDKLNYLVFKDAKPNEPGHVLNAFQLTAPFDSFKKLGKQTGLLYYVQASYTSKIDPVSGFINFLYPKYESLLKSKIFFESMDGIRYNADKDYFEFSFDYRKMTPNRNLEGYQTKWTACTFGEKRFKNIRNAHGNWESVEVNVTEALKKILKNEDVDFKSGHDLRFEISKVKSTKFYKKLFKLLQITLSLRHSKTGTDEDFILSPIVDENGKFFDSRNATKDQPMDADGNGAYHIALKGLWNLEQIRNWDGESRLNLAMKNVDWFSFAYQKPFKK

SEQ ID NO: 6358 - protein, 1252 aa, unidentified
  source 1..1252: note = MG29-35 effector
MGMIGDQFIGQYFLQKTLRFELRPIGETQKLLRDFKEGVQGNLLEYDAERARAYPTVKKILDDYYRYFIDQVLSGFAFDSQTINEVFEMYKKAKKDAEAAKEYAVHTKKLREQLSAAFKALITYYMLDKYEHLFNRNRESRLFEWLDIRFENDHLTENEYDEIKDVLDKFDKFTTYFTGYKENRANLFVADEKATAIAYRVVNENMPRFFENCIRMENIKKRHSDLYKLLVSFEGYFVPQAYANIICQPAITDYNKIIGRPTQNPDEKGVNSIINEYRQKNQIKNRELPMMAQLYKQLLSDRVTVFSDPVINNDEEMQSIIAETIEIARGLFSEVINLTAIHALADNSENIYINSSALANLSHRFCDDWNLIYRACEAKMIKLSGKQKKGLENKLKMAIPMSELQNIIEEYIATLDEELKLSYNNIPVLCDYFQNPPLDDFESATLKFEQIVKTTMSRTDLIQAIKEVLDKAMEVVRFFKPLYLFKGRSPLEVPDRNEDFYNEFERLYAELNLISKIYDRVRNYATKKQFSQDKIKLNFNNPTLLDGWDLNKEQDNLCVILIRDGNYYLALMNRDYRRLFDLKNDEVRNKALGKAGDHCYSKLEYKQVTGASKMLPKVLFAATNSDLFKPSQEILDIRKAGSHKKEAGNIEALHKWIDFCKQSIATHPEWNDHFDFKFRSTSEYSELTEFYNDFDRQAYKIKFVDIKVEYIDQLVKEGKLYLFQIYNKDFSPYSKGRPNLHTTYWRMLFGNENLANITMDPDRPIFKLNGEAEIFFRKASLEKQITHAKGQPITNKSKKDNGKKSESIFEYDLIKDKRYTEDKLFFHCPITINFRAPGTTVGSFNRKVNCFVERNPEVNIIGIDRGERHLLYYTIIDQKGNILEQGSLNQLHNSYTSAGRVVEHNINYRDLLHEKEKGREEARKNWETIENIKDLKAGYLSQIVNLMSNLMIKYNAVLVLEDLNAGFKRSRIKVEKQVYQKFEKAMIDKLNYLVFKELPPGSSGHYLNGYQLTAPFTSFRDLGRQSGFLYYVYPSYTSHICPKTGFVNLLNTRYESIEKAISFFEKFNRIKYNPGSDYFEFDFDYASFGKDVARSQWCVCTAGEKRYYYANHDKTSRECNATQQIKELLDKYNIEYIRGKDLLPEIIKMNDKGFLNGLMFLLGVVLQMRYTVSGTSNDDDFILSPVMDEQGQFFDSRSAATSEPQNADANGAYHIALKGLKMISSISDGKLKTVNKNERQDWFAYVQNKMYR

SEQ ID NO: 6359 - protein, 1003 aa, unidentified
  source 1..1003: note = MG29-36 effector
MNSIFEQFTQQYPLSKTLRFELKPVGNTAKLISEFNESLPESSVAKDEEKSNAYPLVKKILDDYYRDFINEVLSKSDLDALKIKQAFNCYKECQSKNAAADAESKKAEYKAQKSILRKDTASFFSSESLKLSAMFKGTKKSCAIYEYGELFKEASPLFIWLQNRLEKQVISQEEFDRQAGLISKFNGFTTYFTKYKANRENLFANEEKASSIAFRVVDENMEKFFDNCIAYKKITQKYPSEELAAELIKCEQFFTPENYGICLTQSGIDVYNQIIGKKSDDTYGKGINQQINEFRQKNALRRNDAPLMTVLFKQLMSESERVFVIETIDSDEELFSVVKDAYNTCIALVEGLSILCDSSLTDENLSDIFIRPDGLSNLSQKVFGKWDIIDSALNMKKESIGQKKFDAKYSKVISLLDLQTMCDAYISVIDDSEIRRNCTFSDYFKTFESSLIKSAYLEAEEVLNSIGLDKDKSMPTNDTDLGGKGFRQLQKIKQLLDSINEAVHFYKPFLLEKEGKAIEAEENNKEFYNEFLLNYRDLSVFPKIYDKVRNYATKKPYSKDKFLLNFDKPTLLDGWDVNKEESNLALLFIKDGKYYLGIMKNPRLFSNLPVKGIANENEPAYEKVIYKQVSGACKMFPKVFFADLNRELYKPGSEIQRIREEKSHLKGGSEDSKNKWIQFCIDCIDKQPEWKTYFKFNFKEPQEYPDVNSFYKDADAQMYSISFTKISCEYVNDAIKKGELFLFELYNKDFSEYSKGRPNLHTLYWKMLFDENNLHNIMNNPDKGIFKLNGEAEMFYRKASLPDKATHPANKPITNKNPLNQKMQSTFEYDIKKDRRYMSDKFMLHCPLTINFRKEKVGQGQFNNKVNTTIEQNLDDVKIIGIDRGERHLLYYTMINSKGEIIKQGSLNSVTADCGVTTDYRSKLDDKEKSRTAGRENWGQIETIKELKQGYLSQVVHMISQLMIENNAVIVLEDLNSGFKNGRKKVEKQVYQNFEKALIDKLN

SEQ ID NO: 6360 - protein, 1299 aa, unidentified
  source 1..1299: note = MG29-37 effector
MKNNFNEFVGMYSLSKTLRFELIPQGKTLENIQKKGIIATDTARNESYKEMKKTIDEYHKDFINQALSEAKLNKLDEYYQLYNLNAEKKKDENFKKKFDDVKKELRKEIANSFKSGAVKGIFERIDKKELIKEDLENWINENNNNKYFDKDFKTFTTYFKGYHENRKNMYSDEEKSTAIAYRLINENLPKFIDNLNIFEKVKNSQVAENFEAIYKDLEAILNVNSIQDIFTLNYFNEVLTQPQIEAYNAVIGGKSENELKIKGLNEYINLFNQKQTEKSDKIPKLKPLFKQILSEKLHISFLPEAFESTDEMLTAIEKYYKNNLILCDINNNGKQLNILCEIQKILADLKEYDLAKIYLRNDTKITNISQKIFGNYNIIGEALSNYYDKIIKPDFENLYQKADEKKREKLDKKREKLDKEKEKFAKKDYIAIEELQKSIDLYIADFDNSDENKSVKERYSKTCIADYFKNHFFAETKEEKGKSFDFISNISAKYNCVKGILNISFNNSDLTMEQKYNIKLFLDSIMEMLHFVKPIYLKSDEISQKDENFYSTFDPLFEQLSLVTKLYDKVRNFVTKKPYSIEKVKLNFDCSTLMDGWDENKESSNSSILFMKGGSYYIGIMDKRNTHIFEDIEETFEENNYAKIVYKLLPGPNKMLPKVFFSKSRIDEFAPSNEILEIYEKESFKKGQEFNINDCRKLIGFFKDSIQKHSDWKKFNFVFSDTSQYNDISEFYKEISQQGYKITIKYISNKYIEQMINDGKLYLFQIYNKDFSSYSKGKPNMHTLYWKALFDEENLKNVVYKLNGQAEIFYRKASIEEKNKTTHKANKPINAKNPKTPNKTNIFEYDIVKDKRYTIEKFQFHCPITINFKANENPKVNSKVFEYLKNNPDVNIIGIDRGERHLLYISVIDQKGNVLKDKNGKSIQYTLNEIVGQYKNSKGETVDFKTPYHTLLDIKENEKAKARENWSTIENIKELKEGYISQVVHLISKLMLEYNAIVVMEDLNFGFKRGRFKVEKQVYQKFEKMLINKLNYLVFKDKAPNEIGGLYKAMQLTNQFKSFKEMGKQNGFIFYVPAWNTSKIDPTTGFVDFLKPHYKSIEDSREFINKFDSIRYNKEKDYFEFAFDYDNFTTKAEGTRTQWTVCTYDIERYAWNKSLNQNKGDYEKINVTQKIKELFTENNIEFSSGNDLKRLITNINNSKFYSKLLKYLSVTLSMRYSSSKDGKDFILSPVINSNNEFYYSENASKELPQDADANGAYHIALKGLWVLNEINNTDDFKKLRIAISNKEWLNFAQDIAKRK

SEQ ID NO: 6361 - protein, 1002 aa, unidentified
  source 1..1002: note = MG29-38 effector
LGQSKIDEYNRMIGFSIENSDTKGINSLINEYRQKNHIKNRELPMMVQLYKQLLSDREKSFVIDEITSDEEMDEKATECCLEVREIEKKIALLVKEYVTGDNTGRIYLRGSKLTDLSQNIFGQWDIINKALQMKLETLATKKHKEEFDKRSKKAININELNDILQEYFIGLDSGEYKIMQEKPALSELIIENIPVVEYSPVLNGLGFGTKEERINKIKGVFDQIISMLHYYKIFYLYEGNKQLEVAEKDAFFYSEFDGLYNDLSLATKVYDHVRNYVTKKPNSEIKIKVNFNAPTLLNGWDINKEESNLNVLLEKNGLHYLAIMDTNHRRCFDLKDIEVAKVAFCDLDKPYFNKIEYKQVTGANKMLPKVFFAESNIDYYAPSSEIRTIREKGLYKKDANNIEAMWQWIDFCKQSTEKHPEWNKYFKVNFKPTKNYMDVNGFYRDFDDQAYSIKKVRISEKYINDLVAEGQLYLFQIYNKDFSQYSKGKQNLHTMYWRMLFDSQNLKNIELNANAKIFKLNGEAEIFFRRQSLEKNITHAKDMPIENKNPHNPKKQSTFEYDLIKDKRYTENKLFFHCPITINFRAASLPVQFNKKVNKFVANNPDINIIGIDRGERHLLYFTIINQKGEILKQGSLNHIKDNYISNGKEVPVDTDYHELLDRKEKERDAARRNWTTIENIKELKSGYLSQVVHQLAELMIEYNAIVVLENLNAGFKNGRVKVEKQVYQNFEKALINKLNYLVFKDCSLNQPGGVLKGYQLTAPFDSFRSLGSQSGFLYYVYPSYTSHICPKTGFVDLLHPKYQSVAEAQRFFERFEFIRFNQDEGYFEFGLDYDRFGKKMNKSKWIVCTYGEERYGFDGKDMTAKKYNVTDEISALLDKVKIVYGGGRDIKNDISTQDDKAFFKSLLYFLCLTMQMRNTNGGTNDDNDYILSPVQDKKGNFFDSREANDTEPKNADANGAYHIALKGLKLISSIDEEGKLVLKKTETQDWFNFAQEKSYLK

SEQ ID NO: 6362 - protein, 933 aa, unidentified
  source 1..933: note = MG29-39 effector
YDEIYQDAILPLKDILLHLAHYDLNRVYLKNDTGITNISQKIFGDWGVITKAIVKSFTKQYKGKAKPGTEKWDSELNKYQKGFESFSINFINESLLLLESPEYHFSIEKYFIIGGKCKSGANMFQAVEDKYSIARQLLNNVYPEDKNLSQQQGDVDKIKQLLDSIKDLQWFLKPLLGSGKEPEKDERFYGEFSTLMDLLDQVTPLYDKVRNYMTAKPYSTEKIKLNFDNSLFLSGWARDYDTKAGLLFFKDGKYYLGINNKKLTVDEKNELNSSNSALSGKRIILDFQKPDNKNIPRLFIRSKGDSFAPAVAKYNLPINEVIDIYDSGKFKTEYRKTNEADYKKSLSRLIDYFKEGFSKHESYNHYSFCWKETSQYKDISEFYKDVEVSCYQVLEETINWESLMEFVETGKIYLFQIYNKDFSSYSSGTPNLHTLYWKILFDKENTQDVVYKLNGQAEMFFRKASIQHKNRILHKANRPVDNKNELNPKRQNVFQYDLIKDKRYTVDKFQFHVPITMNFKATGINNINPLVNEFIRDNNDVHIIGINRAENHLLYIVVIDSKGHIVKQFSLNEIINEYNGNKYHTNYSQLLNKREAERNEARLNWSTIEGIKTLKEGYLSQVIHQICQLIVQYNGIVVLEDLNMEFKQGRQKVEKSVYQQFEKKLIDKLNYLVDKKKSLSEVGGTLKALQLTNKFESFQKMGRQSGFLFYVPAWFTSNIDPATGFVNMIDTRYQNIEKSKELFSRFADIRYNAEKEYFEFEIKDYTQFNPKSEGTRQNWIICTFGTRIEKFRNPDKNNQWDSREIDVTECFKALFEQYNVNFNENLKEQIVNINDKAFFEQMLDFLYLTLQMRNSEIGNAGSDYIISPVCDPNGRFFDSRTAGHQYPENASANGAYNIARKGLYYVNQIKQADDIRALRLGLTNNEWLKFVQD

SEQ ID NO: 6363 - protein, 884 aa, unidentified
  source 1..884: note = MG29-40 effector
YANAKTENQIKHLNDTKNKWNSDFISLGLLQKTLAKYIETLDADSEIRKIYTPTIITDYFKRHIIKKEVEEAKNNETIKKTTDVELFYSITGQYLGVKGLLNIEKTDNKTLAQEKEKVHQLKSFLDSILELNHFVKPLFLTDDSISDKDDAFYSQLAPLYEQLNKLIPLYNMVRNYLTQKLYCTDKIKLNFENSTLLDGWDVNKEPDNTSVILRKDGLYYLVIMDKAGKKVFMDVPKIAYSGTFYEKMNYKLLPLVNQQLPRVFFAKSRIEFFKPSEAIQENYKKETHKKGDTFNIKDCHALIDFFKASLAKHEDWKHFNFKFSPTKSYQDLSGFYREVEHQGYKMSFENIPTDYIDKMIEEGKIYLFQIYNKDFSAFSKGLPNMHTLYWKALFDENNLADVVYKLNGQAEVFFRKSSIEEKNKVIHKAHELLKSKNPNTPNNNNTFDYDLIKDRRYTVDKFQFHVPININFKASGSEIINAQTNDFLKNNRDVKIIGLDRGERNLIYLTLIDQKGNIIIQESLNTISNKERKIETPYHTLLNIKEKERDAARKSWNTIENIKELKEGYISQVVHKIAEMMVKHHAIVVMEDLNFGFKRGRFKVEKQVYQKLEKMLIDKLNYLVFKDAQPTQPGGLLNALQLTNKFESFKKMGKQSGFLYYVPAWNTSKIDPATGFVDFLKPKYENVEKAKAFFSKFDSIKYNTVKDYFEFAFDYKNFTTKAEGSKTDWIVCTHGDLRFRYNAQTKESEAVNVSQEIKKALKKHEITFEQGKDFKNLLIAKGGKEIFSALLHLLALTLSLRQTKSGSEIDFILSPVTNRKGVFFDTRNADEKMPIDADANGAYHIALKGLWCLQQISQSDDMKKVKLAISNKEWLEFVQNLCWH

SEQ ID NO: 6364 - protein, 703 aa, unidentified
  source 1..703: note = MG29-41 effector
MKSTLDQFSHLYPMSKTLRFELIPQGATTANIESRGFLKKDEERAESYKKMKETIDRFHQDFIEKAMAHVRLSNLEDFENLYNAPNEEKKEDKYKKQLEKVQERLRKEIAKGFKSGEVKAIFLKIDKKDLVTKLLEKWIEENNLEDVHFDPEFKKFTTYFSGFHQNRKNMYTDKAQSTAIAYRLVHENLPKFIDNINIFKKVSEIPELKQNLEKLYKEIEEYLGIVSIEEAFELGYFNEVLSQKGIDVYNLILGGRSEKENKKKIQGLNEHINLYNQKQDKKNKIPKLKVLYKQILSDRTSTSFLPDAFEDDDNSTASQKVLAAIHQFYHTQLLDYQPSDKAETINVLKSFQGLLADINNFDLDKVYLRNDKSISTIAQKMAGNYGVLRDALNYYYENKIDPEFQIKYDKATTDKKRENLDKEKSKFTRQSYISISTLQTALDTYVESFDETHDVKQVYSPTCIADYFKDHFKAEPKEGSDKEFDFVSNIEAKLSTIKGLLNTPYPENERLQQDKKKIDAIKLFLDSIMEYLHFIKPLALPEDFTLEKDEHFYTLFEEWYEQMQLLIPLYNKVRNYATQKPYSTEKFKLNFENSSFLSGWAPDYNTKGGLIIKKQDNFYLCIVEKKLKKEDVEFLKTSPEDHLAHRVIYDFQKPDNKNVPRIFIRSKGSSFPPAVHTYDLPVRSIIHIYDEGLYKTDFKKENP

SEQ ID NO: 6365 - protein, 1252 aa, unidentified
  source 1..1252: note = MG29-42 effector
MSNYYDSFMGIYKVQKTVRNELIPVGKTKDFIDRFVSEQNEILQADKERADAYPFVKEILDDYYREFFNEVLSDFNFPEDDLQKAFILYKASIKDRSQQKDLSKFELDLRNSVASALEKSKSKYALDKNKTLFNEKNGLLNSWLDRKYESGSLSKDEYEKAKKNISRFSNFSVYFTGYQQNRENMFSNEEKSTSVAFRIVNENMIRFFNNCLNFDAVCHTYPELQSKLQKYADFFVPSAFNKVISQNGEKQGIGYYNKKILGQTEQGKESNGVNQIINLYRQKNGLKSKEVPVMAKLYRQILSVDENEKEELIEINSDQELFTVVSESAKKAASLSETLKTLLQEKMAAENFSNMFIRTDSLANLSNQLFGNWYFIKSALINAGIKKITEEYISLAALQDKLNAYIQTLDEKPDISITESLTGYFLQNMDERIKKAFESAQPSLSLQKLDADRSLPSTQKPDGGKGFRQVAPIKELMDAIQEAIHLYNLFLMEFDGKEELPEEIDKDFYARFSSVFPDLKHLTKSYDMVRNYVTRKPYSTDKYKINFDRPTLLAGWDVNKEKDNLCVIFREKDQYYLGIMAAASNKLLDEESKYICPPSEEHYEKMVYKQVSGSSKMFPKVFFAKANDNLFSPSDEILEIREKGLYRKSADDLNSLHKWIDFCKNCIAKHPEWSHYFQFHFKETNQYSNINEFYKDADDQMYNLSFINVKKSYIDNAVEKGQLYLFQIYNKDRSAHSKGRENLHTIYWDNLFSEENMDRIAHSNEPVFKLNGEAEIFFRKASLESEKPTHPANKSIQNKQQPGKALFPYDIIKDKRYTQNKLFFHCPLTINYRADDTKSKAFNTAMNKAVLADSSVKIIGIDRGERHLLYYSIIDQQGRILEQNSLNLVGNGEGETVDYHKILSDKEIQRQNARQSWGEIEQIKDIKTGYLSQIVHRLSDLMIKNNAVIVLENLNGGFKNSRIKIEKQVYQRFEQALIDKMNYLVFKDRSADDPGGSLHGYQLAAPFESFEKLHDQSGILYYVVPSYTSKIDPVTGFVSFLNLHYENREKSCLFIKKLTGFAYHSEADEFEIGLDYRKFGKFPGKQEWTICASNQSRYIYNHHENKYECILASDEFKKLFDSYGIEYRSGCDLRQAAASQQSADFFRQLLRLIQITWQLRYTASGASGDEDDYILSPVRDEKGNFFDSRKLSDEDGGVLEPKNADANGAYHIALKGLLLLKRIQPDGTLKRVPDEKADWIDFAQNKKQLLSE

SEQ ID NO: 6366 - protein, 709 aa, unidentified
  source 1..709: note = MG29-43 effector
MEQLTNFTNLYSLSKTLRFELIPQGKTLEHIQEKGLLSQDEKRAESYKKVKKIIDEYHKEFIEKALHRITLSKLYDFDFQYRLPKEQRNEDAFSKIKESLRKEIVAAFGKDETKEQFANLFKKELIKEDLLYWVGAEDKELVKEFERFTTYFTGFHENRKNMYSADDASTAIAYRIVHENLPKFIDNISIYENIKSNNKDLDFSPILNEMEDIIQGKTLDEIFTLDFFNNILSQNGIDFINHIIGGRSGEAGEKKSKGLNEHINLYNQQQKDKKKRAPKFKKLYKQILSDRGSISWLPEAFEKDEEVLDAINNFYREGLENSVIDEKNVNILNEIELSFKSLLNYDDFSKIYIRNDTAITDISQTLFSDYSILGRALNYYYETFVNPKWITDYSKATETKREKLEKERDKFTKSTYISIDILQKSLAEYIKTLDTDSEIKQKYTPTLIANYFTHHFYAKDENGNETEKTLTYQIVSEYNGLKGFLNTEHSEDYKLIQDKERVHQLKTFLDSIMNLLHFAKPLYLDKNASEEKNELFYTEFTPIYDELAKIVPLYNMVRNYLTKKPYSTEKFKLNFENSTLLDGWDVNKEKDNTGVILLKDDNYYLAIMNKQNNTVFEEIPKAINPQNTFKKMNYKLLPGPNKMLPKVFFSKSRTKEFGVSEKMLENYENGTHKKGDNFNLSDCHQLIDFFKASIQKHEDWKQFDFNFSE

SEQ ID NO: 6367 - protein, 1054 aa, unidentified
  source 1..1054: note = MG29-44 effector
MPKKSLDQFTFQYSVNKTLRFALTDPQGDMEKFLANMREGELKRILVEDKQRAEDYKQVKKIIDAYHREFIEEVLGQKGVLTEEDMNEYVTIYEEFKGLSRDSKNREKVIKKKRDIEKRLREAIVKKFKKNAKYKKLFNAKLITELLPQWLEERRNQKEIYDEAKYSEEKHLVEKFNRFATYFTDFHQNRANMYVEKDQNTAIPYRIVNVNLPKFLDNYLNYEKLIQNHSGIDFSSIEKDLKGELRDLKLSEFMKPSNFLACLNQSGIDSYNTIVGGKTLEAGKKIQGINEILNQYRMKLDKSEAKKIPLMTSLYKQILSDRESHSFLPEQFTSDQEMLKAIREFYESISETKEGEKKSLLNNIKEFLDSFPSENTDRIYIKATEITRISHTLFAGDWALIHRALEYSKLDSQLKKEHIISIEEIETALQKYKEDIDEEDEAIKKKLGNPHPVIDFFKSAEKVEKVEETKNESNSNPTPYKKFNIFATINQHYQAAKEILKLEELHKDRLSPQKEGDKGGKGFQQVTKIKNLLDAIKDLLDLISPLYLEYKRQKIDVSDKDDRFYVELDILYDELFSIVPLYNKVRNHVTKKNRNEERFKINFDKTTLLDGWDVNKETANLGVILRKDNNYYLAIVHKKHSSVFNYVKKRGDSNNKLKIKDGLRRDIIAQNGEGCYEKMLYKLIKEPARDLPHAVFPEKKKNNFNPPSEEIQRIYNKYKKEKQFVNRAQMHQLIDFYKESIKRNIDWNGFNFEFSFTKEYNDIQEFYNEVKRQSYKIDFDKIKSSYIEDKIKKGELFLFKIYNKDFSPHSKGSPNLHTSFWRLLFDEKNLKDTVAKLDGQAEIFFRPASIKKSERKIHKKDVPIENKNLNNAKKESKFKYDLIKDRRYTQDKFLFHVPITLNFSTQNKTAKQFNTEVNHFLQHNTNVNIIGIDRGERNLLYYTVIDQEGKILEQESLNIIANRIPNQNNIIETDYHSILDKKEHERDRARKDWGTIENIKELKAGYLSQVVHKLTNLIIKYNAIVMLEDLNIGFKRGRFKVEKQVYQKFGELYT

SEQ ID NO: 6368 - protein, 1275 aa, unidentified
  source 1..1275: note = MG29-45 effector
MTMKKFVGLYPVTKTLKFELISQGKTSTHIQRKGLLSQDEQLAEQYKKVKEIIDEYHKDFIEKALSGIRLTKLDDFYSQYILSKEQRDDNFFDKIKEELRKEIVAAFSKGELKIQFANMFKKELIKEDLLNWIGDEKRNSVKEFENFTTYFTGFHENRKNMYSAEEKSTAIAYRIIHENLPKFIDNIRIYDTIKFKHKNLDFSPILNELKDIIQGKSLDEIFTLDYFNNLISQNGIDFLNSIIGGRSGKSSEKKIKGLNEYINQYNQKQNDKKDRIPKFKQLYKQILSDRSSISWMPQAFEKDTEVFDAINDFYHVELGNAEIDGRSVNILNAVKTIVKSLSDYEELDKIYLRNDLSITTISQTIFSDYGVLGRALNHYYETFVSPQWLVDYAKAKETKRKKLEAEKEKFIKSTYISIAVLQTALAEYVKTLDDDSSIKQKYSATLIADYFTKYFYAKDENGNEAKNTLTDQITIEYGDFKNVLDNKRSVDYKLIQDKKHVHQIKIFLDSIMNLLHFVKPLYVDKSASEEKNELFYGEFTPVYEELAKIVPLYNKTRNYLTQKPYSIEKFKLNFENSTLLDGWDANKERDNTAVILIKDDRYYLGIMDKRHNTIFEKIPETNNRNAVFKKINYKLLPGPNKMLPKVFFSEKRMPEFGVPEEIYEKYNAGTHKKGDNFNLSDCHQLIDFFKSSIQKHEDWKRFDFKFSPTKSYKDVSGFYREVEQQGYKITFSDVSEEYINQLVEEGKLYLFQIYNKDFSPNKKDQGKPNLHTLYWKALFAPENLADVVYKLNGQAEMFFRKKSIDAKKTIIHKANEIIENKNPSASKKTSKFKYDIIKDRRYTVDKFQFHVPITMNFKVSGSDYINPKVNAFLRNNPNVKIIGLDRGERHLIYLTVIDLQGRIIRQESLNTIKNKQYNMETLYHELLDKREKERDAARKSWNTIETIKELKEGYISQVVHKITTMMIEHNAIVVLEDLNFGFKRGRFKVEKQVYQKLEKMLIDKLNYLVMKDNKDNEAGGLYKALQLTNKFSSFKDMGKQTGFLFYVPAWNTSKIDPVTGFVNLFNTRYENVEKAKDFFSKFDSIIFNSKEKYFEFEAKDYSKFSDKAEGTRLDWTICTHGERIETFRNSEKNNNWSHRKINITNELLKLFGTENGDFKNLIQEKTDRAFFERLLYLFKMTVQMRNSDNVEDYMISPVADKSGKFYDSRDYAKINEPSLPENADANGAYNIARKGLWILQQINETKTEDDLKKLKLNISNKEWLQFAQRQGLVNK

SEQ ID NO: 6369 - protein, 1328 aa, unidentified
  source 1..1328: note = MG29-46 effector
MEEIFTEITNKNAFSLQKTLRFELKPMIFNEEKNQLQPISESDSYLKNFNSGYLEKLKQIIKHDEERAEDYQEIKVYIDELHKQFIDRVLPEIKSLEIDFKKAFEMYELTKKRYAKPSSDKEEEEQSKEKKNNLKAWQDFQKEARKKISNFLKKQPEYENLFEKELFSDLIPKSNYSKQLGEKSPNDLAKSFSGFTTYFQGFHENRKNIYADEGSTSLAHRIINENLPKFFTNILQYVILNKDHNLLVGQFKENYSDEELTELFNPNSFVSFLNQSGVDRYNEIIEAKKGIETAKSKDGLKQLANRYKQAKQIKNLPNFTPLYDQILGKRGLDQNDESILRAGVTDDKNLLNSLKDFNKNIQPSVFELINICSELNKANAEEIFIMGSSLESLSSSVFGDYSVLSRVMKHHYIESRISASRTTEKKLEKDSEAYLKQETYSLQEIQSAIDYYIEKGNELESKSLFDYFTACKYNSNHTLSEEIKIAWDNLQPILELEQIDKDRAIPKTQEEQGGKGFQQVEKIKLFLDSYMQLLHFAKPLHLVKKRNPVTVSKKDEAFYAIFDKNYTNLEAELIPVYNQTRNYLTKKPYSLEKFKINFEKGTLLNGWDLNKEKDNLGVLFLKNNNYYLGIMSNNKIFDFQKQNIKKEALSLSGQQDGYHKVIYKYLAGPNKMLPKVFFAKSNLEKFSASEEILRIRNTSSFTKNGEPQPSYKKAEFNLNDCHAMIDFYKQSLASHEDWSQFGFQFLETSQYSDISQFYEDVAKGGYKISFVNISDNYINEKVKAADLFLFQIYNKDFSEQKKRKDGKPNLHTMYWNAAFRPWLDRSESNVKLNGEAEIFFREHSIERKITHRSGEPIDRKNPKNPGESLFSYDLIKDKRFTSDKFFFHVPITINYKNKKERNNKQFNDVVNSVIKNNRDVNIIGIDRGERNLLYYTVIDQDGRILEQNSFNEISSQCSTSEKSSTFDYHKKLDEKEDERKQARKSWGTIENIKELKSGYLSHVIHKLAKLILKYNAVVCLEDLNAGFKRGRMKIEKQVYQKFELALIHKLNCLVLKDREEGEFGSYTNPYQLSGKITSYQDIFSQTGIVFYVNPAYTSKICPKTGFVNFLDLRYENLEKAKSLIENFNSIRFNNHENYFEFDLDYKKIPQTQNKECGEKTQWTVCTYGNERFIYNPKTRGYDTYNVTEKLAHLFKKHNISYEDGLDLREKILASTQDAVSFFKELLFLLRLTMSLRHVNENHDCILSPIKHPELGFFDSRDVKDSTEAEEPRDADANGAYHIAMKGLQIFAEKISSENPKLSIKKEDWFRFIQNHHETKWKEKSLSPI

SEQ ID NO: 6370 - protein, 1109 aa, unidentified
  source 1..1109: note = MG29-47 effector
MFTNLYSTSKTLRFSLIPQGDTLNNIEKAGILAEDERLAEDFKKVKKIANDWLKNFINESLAGVSLSLENLLIYEEKYNLFPRNEKDEEEFDGIKTKLRKEVVSYLAKNPKFKLLGSADFIRKELPEFAKTEEEKNLINKFKTFTTYFVNYYKTRENIYSAEEKHASHAYRVINENLPLFITNKKNFDIIKNSYPELIEDIKKSVEPLLNGEKVEDMFSTEWFSKTLTQSGIDLYNKMIGGESLEDGKKIQGFNEKVNLFRQANKLDGKSVPMLKQLKKQILGDKNVPAWITEGFKNKDSMSNAIVEFMDNIKPVLFTAADLFVAEESHDYNKIFIKSRFLADLSHELFKDWNFLKNILLEKYTAKNPKSKNQEKEFAKISYFSVAEIQAALPNLSKDFIFEFFYNKTIKIVAEIRQSYELWNTNQENVIILKSLMDNILQLHRTFKLFDIDEADKDPVFYELFDRIFEGIDGAVKLYNKVRNFITKKPYSLEKIKLNFGNSTLLAGWDVNKESDNSSVLLRKGNDYYLAIMDKSHNKVFKNAPLVKNNEESYKKMEYKLLPKSYMMLPKVFFSGGNKHKYEPSDEIMRIYENGTFRTGDNFNINDLRKLIDFYKDSIKKNPEWSCYNFNFKPTEEYQKINEFYEDVDSQGYVITFRDITASYIDELVKDGKVYLFKIYNKDFSVYSKGTPNLHTLYFKMLFDERNLKDTVYKLNGGAEMFYRKKFLNYSEEIMKNGHHAEELKGKFDYAIIKDRRFAFDKFQFNVPITLNPNTSGHGNINDICRDFIKSNDINVVGVHRAENHLVYITVLGSAGNIIEQHSLNEIEGYNGKNINYMEKLEKRGEERDEARVNWGVIGNIKELKEGYLSNVISKIAALMVRYNAVCAMEDLSFSFIRERSAIEKQIYQKFEKMLIDKLNFYVDKKKEPEELGGLLKPLQLANKFVSFEKMGKESGMIFYVSPYKVTDIDPVTGFVNLFDTRYFNIEKALQFFAKFKDIRYNKNTDLFEFKFDYVDFTDKDRIQSARTEWTVYTYGERIERFNDNNQPKFRKIDLTKEFKNLFSEYSVDYKGDLKESILSLNEKDFFVRLLSLFRLTVQMRNGDFIISPV

SEQ ID NO: 6371 - protein, 1345 aa, unidentified
  source 1..1345: note = MG29-48 effector
MEIKEKTLDNFTNQYQLSKTLRFELKPVGQTAEWIKKHNIIAVDGDTLTGVDADRAKNYKYAKLLLDELHRLFIEDALKLAPEAESTEKLKDKIIELYSASEIKDANLPGELFKQILDDKADEWIKLYQKEMPQYWREDISVLKDKSSRETDKKEIRNLDRIAAKLNKLCETGQSFKKTGIEILYGANEDPLKLLEWAVRCGKIRPSFKDLKQSKSDSAMPQEHIVSYIRNFDNFCTYFTGFNENRANVYDVTGAKSTSLIHRIFMQNMQFHFNNIRKWEIVRKSLEGYTNGFVEKDYNWKLKLDECEKSLSFSSDEIFTPQAFINFINQSGIDRYNEIIGGLAQEGGKTKTQGINESINLVRQHAGAKRNEFPPLQLFYKQILSKSDRTFISAFETDEEMFDRIKDFRQKCFIEMETGKLPIIQEFIKDIDKLISESLDEKSNVFISKDKLTRISQELTGSYNTINLRLLSELGEKVFNRNVCFSVQQIDDALNAMVDGEKFSSRNQNIKVEYQSTSGNILYDFFSKRLNTSLSSIEASWKNLNENGVFSGKELDKTRENEKEKGFEQIAAIKGFLDNSIDFLGFVKDWTLQEKKTSGNINNVWYETLQLFCDHFPIIKLYNMVRNHVTQKAHSDEKLKINFDNSTLLDGWDRNKESSNYGILLEKEGLYFLGIMTPESNSIFDYEISDSDSQTKKQGKQELANAIKASDGENLYKKVVYKQIADVSKDIFTLCWNEKENKAIRKTKGRESVWGENITRIKESKSYQNNEADRKCYFEYLIKCANSYWKHFNVKLKPADEYEDFSSLINDIDAQGYKISFDNIKKSYIDEKVFKGEFYLFQIYSKDFSQKKKSGGKDNLHTSYWKLLFDAENLKDTVLKLNGQAEVFFRKASVSLTEEKKTKGHHYERLKNKFKYPIIKDRRFAEDKFFFHCPISLNFKAEKSIPQDKYKPSFNSKFNLQIKAFLQNNSSVNIIGIDRGEKHLLYYSVTDRNGNVIEQGSLNSIAGFKGNEINYHEKLDKKEGNRDKARKSWSLIQNIKELKAGYLSQVVHKLSQLIIQHNAIVVLEDLNYRFKRGRFKVEKQVYQKFEKALIDKLNYLVFKDKKHRLEPGHCLNAYQLSGSYHLDSLKFQKQSGILFYTAASYTSTTDPVTGFMKNVYVSYESVEKSLKFWESFDSIIYNPAKDRFEFKYTLGKIASKSMDKEKDEEKITKKQWTVCSCVVRSSYNQKNKTHELHDVNQELKDLFDGKLKKLVNGKLDYLNGRDLRDSICQIQEKGFLEELVRLFNAIMAMRVIDSGKESGTDENDFILSPVEPFFDSRKGYVGLPENGDANGAYNIARKGIC

SEQ ID NO: 6372 - protein, 1303 aa, unidentified
  source 1..1303: note = MG29-49 effector
MNLNQFTHLYPISKTLRFELKPVGETSDYIENFKSQYLKDIVKNDIQRASDYDIIKEIIDDYHRYYIEEKLSNPINTKTGEFYVNEEEIENAFSYFQKFKQNPKDDKLKKEWNDTQILLRKQLVKVFSDRKKQLFGKELITKHLPEWLQENGTWEDNKRIVENFNKFTTYFTGFHENRENMYSAEEQSTAISYRLINENLPKFFINCIQYSKIKNQFTDIEFKIDSNLLQKMGVSTIFDIFQPRYFIKLFTQTGIDNFLELLGGYTKDDGEKVKGLNEFINLYRQKNSIKSRLLPNFTALFKQILSDRETNSFIPLEFNNDNELLESLHQFIAEMGKNNGVLFKFENAVQLLQDADLSKTYIKGGINLTDISQKVFGNYGIIKIAILHYAETIIYPTPKNGKISDTLMNKRKNIVNQEIFSISELESMVLQYANHLEDGHQDKEMILQFEQPILNHFLSIIKKIKQKKGEEIENIIQNVLPLLELENLSKGKAGQEQTQKIQTMLDAFLSLGHAIKPLHLVKGRKPIDIPDIDMGFYAEFSEIYEIYENLVVGLYNKTRNHLTKKPFSTDKIKINFENPTLLDGWDANKEKDNSGVLIEKNGNYYLGIMHPKYKNLFNYNKGINDLESVKRSQTKDELFDKIIDGNLNHYKKIVYKLLPGANKMLPKVFFSGGRIDFFAPSNEVLKIRNTASHSKNGAPQKGFEKAEFNLKDCHTIIDFFKESIEKHPEWREFKFNFSATSEYNDLSDFYREVAHQGYKMDFHPIKDSYINQCIQEGKLFLFQIYNKDFSPFSSGKPNLHTLYWKALFDPENIKDVVAKLNGQAEIFYRKHSIKKDERTIHKANTSLQNKNENNPKKDSNFNYDIIKDKRYTVDKFQFHVPITLNFKAEGVTRFNDKVNHNLATQKNTHVIGIDRGERHLLYYSVINPEGKIVEQGSLNRIDTDQNYSVDYQQKLDTKEKARDKARKAWTTVDNIKDLKAGYLSHVVHKLALLIVKYNAIICLEDLNFGFKRGRFKVEKQVYQKFEKALIDKLNYLVFKDAKPNDPGYVLNALQLSAPFESFKKLGKQTGLLYYVRADYTSKIDPVTGFINFLYPKYESLAKSKIFFESFDGIRFNSSRGYFEFKIDYKKMTPSRDLIGYQTKWVACSFGDKRFKNIRNANGNWESVEVNVTEELKLLLKNENIEFKSGLDLRYDISSIKNTKFYKKLFKLLQILLSLRHSKTGTDEDFILSPIADNNGVFFDSRNANKTQPKDADANGAYNIALKGLWNIDRIKNWDGKSKLNLAMKNVEWFEFALNKPFLK

SEQ ID NO: 6373 - protein, 758 aa, unidentified
  source 1..758: note = MG29-50 effector
FDSFTTYFTGFHENRKNIYSDKAQHSSIGYRVIHENLSIFLANKRAFELVQQNFPEIAQIAQDSLLEHLEGGVVEDMFELDYFSLTLTQKYIDIYNTMLGGKVLEDGTKVQGLNEHINLYRQKHNIEKRKLPNLKALHKQILSDREGMSWLPDAFENRDELNSTVESFYKESIVEFACCDGVVDITEKFVETLSDDSNYDLSKIFVKNDISLTAISQEIFKDYRVIKDALWQKHLADNPKAIKSKDITADEEKYFSRKNSYFSILEIEKALDEAGQAQKLLDFFKVREIESSKTVKESFADWQNNKEDKKLTKSLLDSMLNLQRAIKPLFVKAEIDKDIAFYASFDTYFESLSGIVKLYDKVRNFESKKPYSLEKFKLNFENSTLLDGWDLNKEPDNTSVLFKKDGLFYLGIMDKKHNKIFTKISENNSKDIYQKIEYKLLPGANKMLPKVFFSNKNIDYYAPSEALLANYRDGVHKKGDNFDLDFCHELIDFFKSSIEKHPDWRNFEFSFSDTSSYEDMSGFYREVEQQGYKISYKDIDSSYIDQLVDDGKLYLFQIYNKDFSPYSKGTPNMHTLYWKMLFDETNLKDVVYKLNGQAEIFYRKKSIEYSKEKMLQGHHYDKLKDKFAYPIIKDRRFAMDKFQFHVPITLNFKAVGSDRLNDDTNELIRTNRNNIKVIGIDRGERHLLYLSLIDSSGRIVEQYSLNQIINSHNGKKHIVDYHQKLADKEKERAEARENWGVVENIKELKEGYMSHVIH

SEQ ID NO: 6374 - protein, 713 aa, unidentified
  source 1..713: note = MG29-51 effector
LDQIYIRNDVSLTNISKKIFKDYNAIKFCLETYFEKDCGKKNSEKWVSNQNYISIKDIENSIIKYFISDETISSNPICDFFNSFKVHDVDLFAAISESYQVLSKDKIDLKDKLNEKDVVKIKSFLDAVMDLMHFVKPLDFNLKGKSKDKLVGAFELDAGFYDNFNKIYNGIDKDQNPNVISFVSTIVSIYNKTRNFVTKKKFSSKKFKLNFRNATLLDGWDVNKETDNYSVILLKDNDYYLGVMTKDSNKIFKSLPNCDDNDYFEKINYKLLPGPNKMLPKVFFSKKFIDYYSPSEEILNIRNCSSHTKNGNPKEGYDKKEFNLDDCHKIIDFFKKSLAKHPEWSVFNFKFKDTSKYKDISEFYKDVETAGYTLDFIKVSSKYISDLVDDGKLYLFKIWNKDFSKFSKGKPNLHTMYWKSLFSKENLENIVYKLNGQAEIFYRRKSLDKKITHPKNVPIVNKDPINNKSSSIFEYDLFKDKRYTEDKFLFYCPLTINFKSRGNDKEISKFVNQKIMNLKEDISILGIDRGERNLIYCTLIDSKGKIIGKQSMSLNGITDEFNRTSDYHKKLDDLEGKRDVARKSWTKIENIKELKEGYLSQVIHKISKLVIDNNAIVVLEDLNFGFKRGRFKIEKQVYQKFEKMLINKFNYLVFKDKDLSKSNILKGYQLTNKFTSFQKLGHQSGILYYIPASFTSKIDPKTGFVNLLYPHYR

SEQ ID NO: 6375 - protein, 1260 aa, unidentified
  source 1..1260: note = MG29-52 effector
MKNFTNIYPQSKTLKFELRPYGATLDNIHKSGLIDQDETLKADYHAVKKMIDEYHKVVIDESLTNFKLTDLPAYEELYYKSRTEVEDKEFEIIQSNLRKQIHKAFSENKRFKSIFKKELIQKDLPAFVKKEEEREQISRFYHFTTYFTGFHENRKNIYTAEAKATSVCNRLIHENLPKFLDNRKTYLNYISNFIDLDLSQVEEDLQEVLGDITVDDLFSLDSFNHTLTQRDIDIYNLALCGRSIEGEKKIQGINECINIYRQKNRLKARQLPNIKPLYKQILSESKSGSFLLDKFEKDEDLFDSLRNFYHCLNSFNYKGEQDKSTFIELMTLFGRFSESDMTRVYLRNDASLSRLSKKLFGDWSLIVSALKYYYDAEANPLMGKKATNKYIKEKENWLNKSSNFSIDVINKSLLRYGTINETVNSQFTDDMIFEHFSSFMIEEKNLLNTVAENYMLVSEVLSRGSLDKNQNKKKKEIKTIKTFLDTVLDLLHFIKPLSVQYVGAEKDEGFYSDFDVLYDQLSQVIPVYNKTRYYLTKKPYSMEKFKMNFKNNTLLDGWDVNKETANKGILLQKEGLFYLAIMNKDHSKSFYNIMDTGDTTGYQKMNYKLLPGPNKMLPKVFFGVKNLNFFNPSDEVLRIRNTSSHSKNGNPQEGFEKADFSLSDCHSLIDFFKASLNKHTDWKKFAFDFSPTQSYDDISEFYREVENQGYKITYTNISDAYIHELVKEGKIYFFQIYNKDFSPFSKGKPNLHTLYWRALFDEKNLADVVYKLNGQAEVFYRKKSIEYSEEKWIQGHHHEQLKDGFAYPIIKDKRFAFDKFQFHVPITMNFKALGAPVINMKVREYLKTNPDVKIIGLDRGERHLLYLTLIDQNGNIEEQYSLNEIVNSYNGKVYKKDYQQLLHVKEGDRKKAKKNWETIEAIKELKEGYLSHVVHKIVNMMVEHNAIVVMEDLNFGFKRGRFHIEKQIYQKFEKMLIDKLNYLVLKDTQDPKTPTGLLNALQLSNKFESFQKLGKQSGFIFYLPAYLTSKIDPTTGFVNQLRIKYDSIVKSQAYYRQFDTIVYNNTSDWFEFSFRYVNFANTTPSARKIPWTICTTHHPRYAWNINSNVGNGGTEEYNVTKELKKLFDQHKIAYEEGTDLIESIASNTAVDFFKRLNKLLYITASLRHNNGKKGKEEHDFILSPVANSEGGFFNSLEADETQPENADANGAYHIALKGLWALQSIRKTDTDRLSKLNLAVSNEEWLNFAQAKQYRSQNSS

SEQ ID NO: 6376 - protein, 1092 aa, unidentified
  source 1..1092: note = MG29-53 effector
MKEIFNLYRQQLHSSQQEFEKKKKSFPKLAILYKQILSDCSGHSSSIEAYKTDREMLYELERLRNQFANKNTGCPIYNLKKLLEDIDSFDRHTIFIKSESLAEISKFLFGTWNTTRIALGEYANFLFREATKDEKIILKKQKEDFLENSGQMVFLKASDLKKYRERFIKADTFSIHDLETALYRYSQTHQDDMEGVKETGLITSYFKSFTQKINNSKVNIFNQLNEARSKIKDIVELKELSTNRNKDAKGFEQVETIKFYLDSLMNIIHFARPLHLYKGQKKIDSEGVDSEFYADFDFFYNELLDVITTYNKTRNFLTKKPYSNTKFKVNFKNPTLLAGWDVNKEKDNSGILLKKDDLYYLGIMAQGHSKNFDTGTKNSSSKNDDYQKLIYKLLPGASKMLPKVFFSDKNIDVYNPSNKVLSIRNHASHTKNGTPQKGYKKKDFNLSDCHIMINFFKSSILKHPEWVNFGFKFKDTKDYEDISEFYKEVEHQGYSVRFQSISREYIQKKIASNQLYLFQIYNKDFSPHSRGRANLHTLYWRGLFDTENSKNTCLKLNGEAEVFYRHRSIKKADQVVHKANSPVQNKNPKNPKKESQFEYDIIKDKRFTQSKLFLHVPVTLNFKAEASGKYGQFNEAVNQKLKNDLSVNIIGIDRGERNLLYYTVINQRGGILEQGSLNSIKTHYKNKKNEFVEVETSYHDLLDKKEKERDLARKSWSTIENIKELKSGYLAQIVHKLAQLMIQHNAIVVLEDLNFGFKKGRFKVEKQIYQKFEKALIDKLNYLVFKDRKGGVVGSFRKAYQLTAQFQSFKKLGKQSGFLFYMPAYHTSKIDPTTGFINLVNLKYQNKEHASDFISKLESIKYNKEADHFEFDMDYKKLSDRECGPKTRWLICTHGATRYRYVPQDQKMESVDVTGQLKDLLNGAGINYMDGENLASQVLKQNDAAFFKSLLSLLNLTMTLRHSNSQKGEDFILSPIRNKTGGFYDSSVVENEHESSLPQNADANGAYHIALKGAWTLRQIHDRADGAKLKLAMSNKDWFKFVQRKEYLSTPLPEEQKLKVMKGSAKGLSTPSTIGNTPQSDIQPVLKMENKK

SEQ ID NO: 6377 - protein, 1309 aa, unidentified
  source 1..1309: note = MG29-54 effector
MKLNKFTHQYPISKTLRFELKPVGETADYIEDFKSQYLKDIVIQDQQRAEDYESIKVIIDEYHRHYIEEKLSEPFDKKTGELFISGDEFENAFSYYQRFRENSKDEKARKEWIEVQNSLRKSLVKVFSDRKKRLFQKELITKELPSWLKEKGEWEDKKNVVENFNRFTTYFTGFNENRENMYSHEEQSTAISFRLMNENLPKYFNNCIQYHKAIESYDGLSFTVNPDLLNEMGVSILFEIFQQSYYIKLFTQSGIDKFTELLGGFTKENGEKVQGLNETINLFRQQKAIKAKAFPNFISLYKQILSDRETSSFIPDQFENDNDLLKSLGKFIKEMVKEDGLFKKLEDSIKLITDADLHRTFIKNGVEITKISQSIFGNYSILKSAIYHHAESVLYPDPISGKISEALKEKRIKYVNKQVVFSIAELETILSNYASQMTDDNPDKEIIAQCENSEHPIRTYFLNAIENVKNDKDIEFGKAIENVLPLISLENLNKGKDGQAQTHKIQKMLDAFLAVTHAVKPLHLVKGRKPIDIPDMDMGFYAEFSKAFENFEQLVITLYNKTRNHLTKKTFSTDKIKINFENPTLLDGWDANKEKDNSGVLFEKDGNYYLGIMHPKHKNIFNYIKGINDIESEKRSLSKDELFNKIVDGESEHYQKIVYKLLPGVNKMLPKVFFSGRRIDFFAPSTEVLKIRNSASHSKNGSPQKGFEKEDFNLKDCHTIIDFFKKSIEKHPEWKEFEFEFSPTSSYEDLSGFYREVEHQGYKMDFHPIKKSYIDQCIEEGKLFLFQIYNKDFSPYSKGKPNLHTLYWKALFDTENLKDVVAKLNGQAEIFYRKHSIKKDERTIHRANKSLQNKNENNPKKTSLFEYDIIKDRRYTVDKFQFHVPITLNFKMEKMTQFAHNEKVNQMIVKSENTHVIGIDRGERHLLYYSVINPKGHIVEQGTLNTISTDKGYEVDYQQKLDSKEKARDTARKSWTTVENIKELKAGYLSHVIHKIAFLIEKYNAIVCLEDLNFGFKRGRFKVEKQVYQKFEKALIDKLNYLVFKDAKPNEPGHVLNAFQLTAPFDSFKKLGKQTGLLYYVQASYTSKIDPVSGFINFLYPKYESLLKSKIFFESMDGIRYNADKDYFEFSFDYRKMTPNRNLEGYQTKWTACTFGEKRFKNIRNAHGNWESVEVNVTEALKKILKNEDVDFKSGHDLRFEISKVKSTKFYKKLFKLLQITLSLRHSKTGTDEDFILSPIVDENGKFFDSRNATKDQPMDADGNGAYHIALKGLWNLEQIRNWDGESRLNLAMKNVDWFSFAYQKPFKK

SEQ ID NO: 6378 - protein, 709 aa, unidentified
  source 1..709: note = MG29-55 effector
FDYYLGISSDPKLFRSHLQDEIEKEDISDFERLDYYQLKSATVFGNSYVGDSYSKDRDLLYQKILEFVENTEPLKADIDKYVSSQKGTNQPTPSGIISIVKEKYPELLQKLKDDQGFSEINKTVTDRLKKTILSLHRIPRSQEYKNHNFSLFTEAIEVIEELSSEKSFAYFKVSKSELENALNRDSKPLFLFKITNKDLSFADSFIAGKRKSRGTDNLHTLYFKALMSGSQNVFDIGTGEVFYRKEDYKGKKIVHKANEPIENKNRLNDKKHSLFEYDIVKNRRYLVDKFQFHLSIVQNYIKPKKYPDFNTEVNQAIKGASDIKVIGVDRGERHLLYLSLIDSSGRIVEQYSLNQIINSHNGKKHIVDYHQKLADKEKERAEARENWGVVENIKELKEGYMSHVIHRIATLMVKHNAIVALEDLNFGFKRGRFKVEKQVYQKFEKMLIDKLNYLVDKQKSPNELGGLLKAFQLTNKFVSFEKLGKQSGFLFYVPAWNTSKIDPVTGFVNLLDTRYQSIEKSKEFFSKFDAIRYNDQKGYFEFEFDYKNFTTKADGTRTKWTLCTYGTRIKTFRNRDKNHQWDNVEVDLTAEFKSLFGLHSGDLKELIISQDRKEFFETLLYLLWLTLQMRNSVTNSEIDYLISPVADKNGNFYDSRVASDDLPRDADANGAYNIARKGLMIIEKIAKSKSGEKLNLTISNKEWLAYAQR

SEQ ID NO: 6379 - protein, 879 aa, unidentified
  source 1..879: note = MG29-56 effector
MDFIEECYKPIKNILLSQNEFNEEEIKNLQNFLNPFIPNRPENSDSYNGKEKNEKLKQDQYNTERGSVGLIGLLRLIKPVYPEKDKKKIMDLEKDASFYNEFEKLYEELSNGFPLYNKIRNYITKNSHRTEKIKINFEDSTLLDGWDVNKETDNLSVILRKKDEVTGWKYYLGVMNKHEFKGANKIFDYHIESDESDKTRQEKKKLKQTILHKEDNENFYEKMNYKFLPDPSKMLPKVFFAKKNISFFSPSSEILEIKNKKTYTKNNGDTFSLNDCHKLIDFYKASIQKHKEWGVIFNFKFSHTKKYEDISEFFAEVASQGYRLSFDRMKSSYIVDKVKKGELLLFEIYNKDFSKNSKGKTNLHTSYFKLLFEEKNLKDIVYKLNGQAEIFYRKASKQKKISHKANVPVENKNPDNPKKTSQFKYDLIKDRRFTEDKYFFHVPIDLNFKTRKTNPSKFNQNVLKFLKDNKNINIIGIDRGERHLAYYTVINQRGAILEQGSFNKITANYKDQNNKNVKITTNYHALLERKEIERDQNRKAWTKIENIKELKAGYLSHLAHQISHLMIKHNAIVIFEDLNRGFKRGRMKFEKQVYQKLEKALIDKLNYLVFKEKNHEQPGGLLNAYQLTAPFESFNKLGKQTGFIFYTPSYYTSKVCPLTGFVNLIYPKYENMKKSKIYFNNFKKIYFDSKKGYFVFEYQDGKVNPSRKSESNAQWEVCTQGPERYKYNWKARKYEKHNVTDELKKLFKEYNINYKAEEDLRESIEKQDEKKFFEGLTQALYLTLQLRHINTEEKDSDKKDFILSPVADNEGRFFDSRRVKDSEPKNADANGAYHIALKGLKMFEDIRNTKQQKLSSLKNKEWFEFIRTKPFLFDSRKAS

SEQ ID NO: 6380 - protein, 724 aa, unidentified
  source 1..724: note = MG29-57 effector
ELYTQLAPWQAYFVPENYSSILAQSAIDNYNYCVIGRLADNTDAAGVNIVINQYRQKNNIDNKILHPMVQLQKQILSDKPSFVPVIETNEEAVSLVKVNYCKLQELNDKLQALISEQITPETIGDFYFRSIKLTGISLDVYLDWNYINQAKDIYIQFLNEKQQKAFYEKEWGKVINISTLIRIITGFKRVRIGESSNVSEESTIKELLTYVNAAPDFTVDIEKISANNIANYKDVLDKMNANIQFYKMFSLYDGNKKINVTNKKDYFYNAFDSIYSEMKAISRDYDKIRNFATKRTKGENKVKLNFANAQLLSGWDMNTEKNYHSVLFAKDNKFYLGILGNKASGVFNFSNPDIVLKANEPGQKYQKMMYKQMGGANKMLPKYAKDLATKHALPKHIQEIYEKKLYTKEANNPNAMYIWIEWCKEALKTNPNWANYYSFNLLDSQQYKNMNEFYTAVDNQAYFVEWADVSEAYIDELIDSGKLYFFQIYNKDFSDKKSKPGTDDLHTLYWKALFSPENLSRKEGPIFKLCGNGEIFWRQPSVEYHVTHRANQPLQNKNPFNPKRESVFSYDLVKNKRFTENKYFFHVPIKLNFRSGNTVFKYNEKVNRYVEGNKDINIISIDRGERHLLYYTVIDQQGKILEQNSLNVIYNTHLIENNTIWTKINYRDLLDKKEKQRADARLAWENIESIKELKTGYLSQVVHQVTKLMEKYNAVVVMENLNTK

SEQ ID NO: 6381 - protein, 918 aa, unidentified
  source 1..918: note = MG29-58 effector
MNFNNFTHQYSLSKTLRFELKPIGETADYIEDFKSQYLKDIVTQDQQRAEDYKVLKEIIDDYHRHYIEEKLSEPFDKKTGELFISEEDFENAFSYYQRFKEDPKDEKSKKDWLDTQSSLRKSVVKIFSDRKKRLFQKELITKELPAWLKEKGEWEEKKNVVENFNRFTTYFTGFNENRENMYSDEEKSTAISFRLMNENLPKFLNNCLQFGVIIEKHIDLDLKIESKLLQKMGVSNLNEVFQPSYFIQLFTQTGIDNYSELLGGWTKENGEKIQGLNELINLHRQKYSIKAKGLPNFIGLYKQILSDRESSSFIPDQFENDKALLESLKIFVKEMAKTDGIFVNLKKAVTLLKEADLDKTFIKGGVEISKISQAIFGQYSIIRSAIYNYAETVMYPTPKTGKVSDVLEEKRKKYANNEDIFSIAELESMLTSYREQLEDEHPDKEIITHCENSEHPIRTYFLNIIDNVKNDKDIELGKSIENVLPLLSLENLNKGKAGQTQTHLIQKMLDAFLAVTHAVKPLHLVKGRKPIEVPDIDMGFYADFSSAFEIYQQMIIGLYNKTRNHLTKKPFSTDKIKINFENPTLLDGWDANKENDNSGILFKKDGNYFLGIMHPKHKNIFNYIKGINDIESEKRSLSKDELFDKIVDGNSDHYQKIVYKLLPGVNKMLPKVFFSGRRIDYFAPSTEVLKIRNTASHSKNGKPQKGFEKADFNLKDCHTIIDFFKQSLEKHPEWKEFEFDFSPTSSYEDLSGFYREVEHQGYKMDFHPIKKSYIDQCIEDGKLFLFQIYNKDFSPYSKGKPNLHTLYWKALFDPENLKNVVAKLNGQAEIFYRKHSIIKDDRTIHRSNKSLQNKNENNPKKTSLFEYDIIKDKRYTVDKFQFHVPITLNFKAEGVTRFNDKINRELSKNSIQTFAWSK

SEQ ID NO: 6382 - protein, 1256 aa, unidentified
  source 1..1256: note = MG29-59 effector
MLSHFTNQYQLSKTLRFELKPVGETLKHIELKGLLAQDETRSQEYQEIKIIIDKYHKAFIEEALHDVSLSKLAEYETAFFDKNRDEKAFEKLQDALRKEIVMQFKKDAHYATLFKKELIKADLQNWQELSDAEKELVSHFDNFTTYFTGFHENRANMYTDEAKHSSIAYRIIHENLPIFLTNKKLFEIISQKAPQLAQETQDALLEHLNGAIVADMFELSYFNRLLSQSHIDLYNQMIGGVKKDELKIQGFNEKINLYRQANGLSKRDLPNLKPLHKQILSDRETLSWLPEAFENYEELVQGVQAYFNSEVLTFECCDGKVNLLEKLPELLNQIQDYDLSKIYFKNDVALTSASQAIFKDYRIIKEALWEVNKPQKSKDLAADEEKFFNKKNSYFSIEQIDDALKEAKLFASMMAYFQSESSKTIEQIQVAYAQWKQNTSNKELLKAFLEVLLSYQRLLKPLNAPNDLDKDVAFYVYFDTYFASLSGIVKLYDKVRNFMTRKPYSLEKFKLNFENKGDFLGGWVDSHTENSDNGTQAGGYLFRKKNHIGEYDYYLGISKDTKLFRSHLQNEIQEEDKSEFERLDYYQLKSASVYGNSYIGGSYDEDKKMLLKSIYKFAENNHPLKADFDKYIASQKGDNQPTPNGMINIVVEKYPQLMQELVKNEEFEAANKMVIERLKQTILSLHRVPKSQDYRDKVFSLFIEPIQIIEELSKEKSFFYFHVSDNEFKSALARDEKPLLLFKITNKDLSFADSFASGKRKSRGTENLHTLYFKALMSGNQNVYDIGTGEIFFRKKSIEYSEERLKKGHHFDDEKKLKDKFAYPIIKDRRFAFDKFQFHMSIIQNYMYPKQPKGFEEKVNLAIHDADNIKVIGIDRGERHLLYLSLIDSNGKIIFQETLNSIVNTFNNEPIDYHSKLDAKEKDRDKARKEWGVVENIKELKEGYLSHVVHKIATLIVEHGAVVAMEDLNFGFKRGRFKVEKQVYQKFEKALIDKLNYLVDKKKQPDELGGILNALQLTNKFQSFEKMGKQNGFLFYVPAWNTSKIDPVTGFVDLFDTRYASVEKSKAFFAKFKTIRYNEAKDYFEFAFDYNDFTDKAKDTRSEWTLCTYGERIVSFRNAEKNHQWDSKTLHLTTEFKNLFGSYTGDLKATILAHDDKEFFEKLLRLLRFTLQMRNSITGTDIDYLVSPVADEQGNFYDSRKADASLPKDADANGAYNIARKGLMLMRRIQKAEDPKKVNLAISNRDWLRCAQGLEK

SEQ ID NO: 6383 - protein, 1201 aa, unidentified
  source 1..1201: note = MG29-60 effector
MQKNDTVLKFNKHSNKLLCSFTRKYPLSKTLRFELKPVDDTKKYLKDFVQSDQERAGDYKELKKIIDEYHKDYIEKSLSKNDILSLDDLNNLKEHIKKSGSLQPLEEKQKNEKSIKKELHTLNKTTKSKPKKNEESIIKKLQNTLRKQITQAFQLKENKDRLFGKKLINEVLPEWLDSCSLEDIEHKKEILKKFQKFTTYLTGFHENRKNIYSDKEQSVAVPHRIINENLPKFLSNLNTYEKIEKHFPGLKTHFESLKEQLKAEFEYFEIQNIKDLFKINLFNRCLTQEGIDNYNAIIGGRVLGSGQKIRGINEKINRFRQIQPEKGDRETIRIISNKNLPIMQTLYKQILSDRESHSFYFEEFKSRKEVLDSVNLYWESIFKKRGNQSVVQRIKNLFTNLKKYELDKIYFKSSDLSHVSNKLFGDYSVIGSALNFHAEKKFSKKKEREQYVEKDFFSFDEIHKALSGYLKENKEIQVSKHFSGFKEIHKALSGDSQTGQNNILAVYFNWEFSKKKYNNKSLLDFIEECYKPIKNILLSQNEFNEEEIKNLQNFLNPFIPNRPENSDSYNGKEKNEKLKQDQYNTERGSVGLIGLLRLIKPVYPEKDKKKIMDLEKDASFYNEFEKLYEELSNGFPLYNKIRNYITKNSHRTEKIKINFEDSTLLDGWDVNKETDNLSVILRKKDEVTGWKYYLGVMNKHEFKGANKIFDYHIESDESDKTRQEKKKLKQTILHKEDNENFYEKMNYKFLPDPSKMLPKVFFAKKNISFFSPSSEILEIKNKKTYTKNNGDTFSLNDCHKLIDFYKASIQKHKEWGVIFNFKFSHTKKYEDISEFFAEVASQGYRLSFDRIKSSYIVDKVKKGEFLLFEIYNKDFSVASKGKPNLHTSYFKLLFEEKNLKDIVYKLNGQAEIFYRKASKQKKISHKANVPVENKNPDNPKKTSQFKYDLIKDRRFTEDKYFFHVPIDLNFKTRKTNPSKFNQDVLKFLKDNKNINIIGIDRGERHLAYYTVINQRGAILEQGSFNKITANYKDQNNKNVKITTNYHALLERKEIERDQNRKAWTKIENIKELKAGYLSHLAHQISHLMIKHNAIVIFEDLNRGFKRGRMKFEKQVYQKLEKALIDKLNYLVFKEKNHEQPGGLLNAYQLTAPFESFNKLRKQTGFIFYTPSYYTSKVCPLTGFVNLIYPKYENMKKSKIYF

SEQ ID NO: 6384 - protein, 1139 aa, unidentified
  source 1..1139: note = MG29-61 effector
VEKDLKDILNSSNLKEFLSLENFNNCLNQKGIDKFNLLIGGKSEEGNKKIQGLNERINLFSQKLEKKESHLFRKLKMVPLFKQILSDRVYSSFVLEKFKDKKELFETINCFYNGSTSEGGDEFEGFKKISIKIKNLITTLKENDLDHVYVKKDSLSKISQELFGDYNKLNECLGEKFSKGLEGKLNTKGKLFTPAQIKKEVEKLLKNKFFSLKEIEDAIHFLDEEEQNKSVINDYFLLFKQKGLHESDLFKQIDQNYYEYSKIDKNSPYKLNERKSELDVEVIKKLLDAILDFYHFIKPFHTKIKKDDNDKGADALEKDAEFYGSFDSAFEDLEKIIPLYNKVRNFVTQKPFSTKKFKLNFDNSTFAAGWDVNKEKDNSTVILRKFNSKRNDFDYFLGIISGIDKKIFEKTSLVSTKSSFYEKLRYKQIADVSKDIQNLMVINGKTVSKKGRKNTQGINQQLEDLKNKYLPKEINLIRKKKSYLKNESTFSKKDLALFIDYYKKRLDYWDFKFELKKSEEYTDFNDFTTHLGSQGYKLSFISLSEEYINNLINEGKLYLFQIWNKDFSEYSKGRPNLHTIYWRELFSEENLRNIVYKLNGEAELFYRRASIKEKIFHKRGVKIAKKWFKDKPVPKEIVLKLNRYYEGKISKDDLNNDDLKFINNFVIKEQEEGKNDVIIKDKRYTEDKFLFHCPITLNFKAKGSEKNVHKLINKHINETRDEINIIGIDRGERNLAYYSLINSKGEILEQNSFNIISDDLQRKLDYQEKLDQIEGDRDKARKNWKKIANIKEIKEGYLSQVIHKIAALAIEKNAIIVLENLNFGFKRGRFKIEKQVYQKFEKMLIDKLNYLVFKSNASEDKGGSLNAYQLTNKFETFQKLGTQSGILYYVDAYKTSKICPRTGFINLLFPKFETIKQSKEFFSKFNFIKYCSKEDLFEFNFDYSSFSGDKKTIYHKLVKDNWSVWSNGIKLINKRDKNSNNKWKTFEFDANKELKSLFEEYHIDYSSQENLINSILAVDNKSFFELLIFNLKSILQLRNSYLDFEVKSFKEKEGESYKESNYDYILSCVKDKNGLLFDSRKAKNFEIQDADANGAYHIALKGLMLIEKIKEEPDYNNKTKIDLKIDRTKFVNYVIKKNS

SEQ ID NO: 6385 - protein, 1254 aa, unidentified
  source 1..1254: note = MG29-62 effector
MKINKFNDFKNLYQLSKTLRFELIPQGKTLEHIEKNGLLQQDEQRAKDYQQVKKIIDDYHKHFIDEALANTKLENLQQYYDLYIKRDKSDDDKKQLENIKKELRIRLIEAVKSNTKFTTIFKKELIKDDLVAWLEKQAREQENEVNLIKKFSDFTTYFSGFHENRKNMYSDEEKSTSIAFRLIHQNLPKFVDNLQIFEKVKSSGLDFSSMSLLLGDVPLEDFFKLEYFNQTLTQVGIGLYNLMLGGQSSDDGFKLQGLNELINLYNQRQDDKKNRLPKLKPLFKQILSDRDGYSFVLESFKNDGDVCNALSDYYVKKLSNSECIFERLPTIFNHINEYDTKQIYINKSALTNLSAKLYGSWDVISKALEFYYITKIDNDSNKNETAIKKKEKWLKQEYFTLCDLDEVIKFYVDNQQIDKCAVTQYLVNYFAQIFTDPNNLIAQITSQYNAVQAIIQNIQPDTKNLIQEKENVAEIKKLLDLIMELLHVCKLFVIKSDIAEKEHNFYSELEYCLALLNPVIALYNQIRNYLTQKPYSLEKFKLNFENSTLLDGWDRNKEPSNTSILLRKNGNYYLGIMNKRHNRVFEVLPQILETNNSYEKVVYKLLPGANKMLPKVFLSTKGKSTFQPSQELLDNYKSETHKKGDNFNLDHCHKLIDYFKDSINKHSDWKKFNFNFSDTATYEDISRFYREVESQGYKITFDLISEQYINELVNDGKLYLFQIYNKDFSPHSKGTPNMHTMYWKALFSEENLANIVYKLNGQAEIFYRERSITKDKIIKHAANQPINNKNIDNDKKQSTFAYDLIKDKRFTMDKFQFHVPITLNFKAQGRDDINLEVKEYLKTNPDTHVIGIDRGERHLLYVSVVNPQGEIIKQFSLNEIINEYKGNTYKVDYHNLLNNKEGDRKKARENWGVVENIKELKEGYLSQVIHKICQLVIEYQAIIIMEDLNSGFKNSRIKVEKQVYQKFEKMLIDKLQYLAFKNPRGNQPDIYNALQLASKFDSFTELEKRKQSGFIFYVPAWNTSKIDPATGFVDLLKPKYETVAKAQEFIRKFDEIKYNQNKDWFEFSFNYSKFTEKVDGTRLNWTVCTTNVNRYSWNRKLNNGKGEQQLFEISKCLKALFDIYKIDYQTSENLIEQIARQSEKDFYVCLMRYLSITLNLRHNNGKSGIDEEDYIASPVADNSGAFFDSRVEVGKGKDKNGNWVSKLPVDADANGAYHIAKKGLWVLQQLKKADDLRKVKLAISNKEWLEFTQN

SEQ ID NO: 6386 - protein, 1199 aa, unidentified
  source 1..1199: note = MG29-63 effector
MLSNFTNQYQLSKTLRFELKPIGNTLEHIEQKGLLSQDEQRAENYTVIKEVIDTYHKAFIEESLASVVFDNLERFEELYLKSNKDEKEQKEFEKLQENLRKEIVKNFKVHPKWNNLFKKELIKEDLLAFEQITDEQKEVVKEFTNFTTYFTGFHENRANMYTDKEQHSSIAYRIVHDNLPTFVNNKKAFESILQKYPQLISDAKSSIEEELLGAVFEDMFLLQYFNHLPSQTHIDLYNTMLGGVKRDDLKIQGFNEKINLYRQANGLNKKELPNLKPLYKQILSDKDTLSWLPEAFETQEELVGAVESFYQEKILAFECCDGRVNLLEKFKEIFSQTQLYDTSKIFIKSDKPLTDISQALFKNYGLLKEALWQKHLDDNPKLQKSKKIEESEEKFFKQKYFTLSSLQEAIEFAKLSANVWNYFQENLDTYIKQIEENHTIWETDKTNTATTKSFLDSLINLQRFLKPLNVQTDSDKDIAFYSTFDSYFEALTQIVKLYDKVRNFKTKKPYSLEKFKLNFENSTLLDGWDVNKEPDNTSILLRKNNLYYLAIMDKKYNKLFCNLEKSTQSDVYEKIEYKLLPGANKMLPKVFFSNKNIDYYNPSKKLLENYKDGIHKKGDNFDIDFCHELIDFFKVSIQKHEDWKHFKFNFSPTKSYEDLSGFYREVEQQGYKISYKNIDTKLVESWVNDGKLYLFQIYNKDFSPYSKGTPNMHTLYWKALFDEQNLANVVYKLNGQAEIFYRKKSIEYTEDKLKKGHHHEELKDKFAYPIIKDRRFAFDKFQFHVPITLNFKAEGNENLNQKTIEYIKTNDIKIIGIDRGERHLLYLSLIDLNGRIVEQYSLNQIINSYNGKEYPIDYHEKLAKKEDERALAREEWGVIENIKELKEGYMSHVIHSITTLMVEHNAIVVLEDLNFGFKQGRFKVEKQVYQKFEKALIDKLNYLVDKKKTPSDLGGVLNALQLTNKFVSFEKMGKQNGFLFYVPAWNTSKIDPVTGFVNLFDTRCSSVEKAKEFFGKFKSIRYNSVKEYFEFEFDYNDFHNKALDTQTQWTICTYGERIKTFRNKDKNSQWDNETIHLTTAFKNHFGNYQGELKEYILVQDKKEFFKQLLDLFKLTLQMRNSITNSEVDYLISPVADKNGNFYDSRKADSSLPKDADANGAYNIARKGLMLVERIKESTDVKKVDFKLTNKEWLQFAQRG

SEQ ID NO: 6387 - protein, 912 aa, unidentified
  source 1..912: note = MG29-64 effector
FGEFNTIKVDLRNEFIRNNNYNVDKLNKTQEKEIEKYLKKEYFTFQEIEDSILRIKNSKDDSSDIKSLFGYFKDFEFSVEHKKISLLETIEEKYKSFKSINFRDFEDSTQKKLTQNDYVEVVNTIKEFLDLLLHYYHFVKVLHYTGEDRDEHFYKEYDELLESISQITSLYNKVRNYISQKPFSTEKFKLNFEKSTLADGWDLNKERQNLSVIFRKNSNYYLGIISKEDTKIFADIEEDLSGEYFEKMEYKLLPGASKMLPKVFFSKSNIDYYKPNDEVLRIRNTSSHTKGGDPQKGFSKFDFNIDDCRKMIDFYIISLNKHPEWKDFNFKFRKLDEYGSIDEFYREVEEQGFKLNFKKISQDYIKQLVDENKLYLFQIYNKDFSENKTKKENYSSKKNLHTMYFEELFSKENLEDVVFKLNGQAEIFYREKSMEYKPTHPKNLSTLNKDPINGKKESIFSYDIGKNKRYTQDKVLFHVPITLNFKSNSRVKINNEVNKIIQKNHNFVNILSLDRGERHLLYYTLLDNKGNILDKGTFNLVNDKFDRNVDYHQKLSVLEKERDEKRKSWQNISTIKELKEGFLSQIIHKISKIAVDNNAVIVLEDLNYGFKKGRFKVEKQVYEKFEKMLISKLNFLMFKDKHNNEIGGSLKAYQLAPQVNVLKDIGKQTGILFYVDPYLTSKICPKTSFVNRLHPKYENEKQARDFFKKFDSIKYLEDEDLFEFSFNYSSFGVKGLVKDDWKIYSNGIKLVQSRDKSQNNNWVTKEVNVNEELKKLFNDFNIEISNSTNLIDDITNQNKFFLESLIRNLKLILQLRNSYTDNELNVKKISEKDGDYILSCVKDKEGNFFDSRKAQDNDVDNADCNGAYHIGMKGLMVLNKIKEFEDIEKLKFNDLKIERQEFLNEMIKRNWG

SEQ ID NO: 6388 - protein, 1181 aa, unidentified
  source 1..1181: note = MG29-65 effector
MFTNLYPTSKTLRFSLIPQGDTLNNIEKAGILTEDEKLAEDFKKVKKIADAWLKNFINESLTGVSLSLENLLIYEEKYNLFPRNEKDEEEFDGIKAKLRKEVVSYLAKNHKFKLLGSADFIRKELPEFAKTEEEKNLINKFKTFTTYFVNYYKTRENIYSAEEKHASHAYRVIHENLPLFIINKKNFNAIKNSYPELIEDIKKSVEPLLNGEKVENMFSTEWFSKTLTQSGIDLYNKMIGGESLEDGKKIQGFNENVNLFRQANKLDGKSVPMIKQLRKQILGDKNTPEWITEGFKDKDSMNEAIVKFIKNIEHANDNLTGELFIRSKPYDYNKIFIKNRFITNISHELFKDWNLLKNNMLEQYKSKNPKSKNPEKEFAKIPYFSIAEIQESIPNQNKHFPDFIIDHFHDKIMTLIPTEKKIHELWKDNKDSIPALKNLMDYYLELYRISKPFDADCADKDPVFYELFDEIFNDFSKVVKLYNEVRNFITKKPYSVEKIKLNFGNSTLLAGWDVNKESDNSSVLLRKGNDYYLAIMDKSHNKVFKNAPLVKNNEESYKKMEYKLLPKSYMMLPKVFFSRSNKHTYEPSDEIMRIYENGTFKAGDNFNADDLHALIDFYKDSIKKNPEWSCYNFNFRPTEEYQKINEFYNDVDSQGYDITFRNIKASYIDELVRDGKIYLFKIYNKDFSTYSKGTPNLHTLYFKMLFDERNLKDTVYKLNGGAEMFYRKKSLNYPEEIMKNGHHAEELKDKFDYAIIKDRRFAFDKFQFNVPITLNPNAQDRGNINDICKNFIKSNDINVIGVHRAENHLVYITVLDSAGKIIEQHSFNEIEGYNDKTINYMEKLAARSNERDEARVNWGVIGNIKELKEGYLSNVISKIAALMVKYNAVCVMEDLSYDFIRERSAIEKQIYQKFEKMLIDKLNFYVDKKKEPEELGGLLKPLQLANKFVSFERIGKESGMIFYVSPYKVTDIDPVTGFVNLFDTRYFNVNKSKDFFGKFKNIRYNEKTNLFEFTFNYDNFTDKDKIQSARTEWTVYTYGERIERFNDNNQPKFRKIDLTKEFKNLFSDYSVDYKGDLKESILSLNEKDFFVRLLSLFRLTVQMRNGDFIISPVMDKTGKFFDSRKPNGKALPENAAANGAYNIARKGLILLNRIKQSENIRKVDLRLSGDEWLQFAQGGDL

SEQ ID NO: 6389 - protein, 1248 aa, unidentified
  source 1..1248: note = MG29-66 effector
MKDFNQFTNLYSLSKTLKFELKPIGKTLDYITEKSLLNEDEQRAESYKRVKKIIDEYHKKFIDSCLRGVKIGNLQEFESLYFSSNKDEKELTSLQKKMRKEIADRFTKTDAYKRLFGKELIKEDLAQIVQDESILKDIEDFKNFTTYFTGFHENRKNMYSADEKATAIAYRLIHENLPRFLSNKRIFEKITKEHPQIIEQAKKSVEPHLFGISIADMFNPEYFNQTLRQEDIDIYNLMLGGKSDSNTKIQGLNESINLYRQRKGLTKRDIPNLTVLYKQILSDRESFSSVLEKFEKPQDLLEAVKEFYINRLTKWADGDNVYNVLEQLKFIVSDDGQYDTSKIFIKNDTSLTDISQQLFGSWSVISNALKQDYYLSNSKLKPSDENDAKFEKIKFYSIQKIEDVLKRYCAEMDDLKEKYTENIILKYFASFRRKDDTLTLIQKAENYYVEAADLLNAEYPPNKSLISDDDAIEKIKNLLDAVMDIIHFVKPLRAKGYEGEKDEAFYAEFLKFADQLDKLIPLYNKVRNYLTQKPYSVEKFKLNFENSTLLDGWDQNKESANTSVLFAKNGLFFLGVMDKKHNKLFEKTPPHKTEDCFEKINYKLLPGASKMLPKVFFSAKNITYFAPDENVIRIRNHGTHTKNGEPQKGFEKKDFSISDCRIMIDFFKSSIEKHPEWKNFKFKFNQTSSYNSIDEFYRQVENQGYNISYQKIDKEYIDELVSQGKLYLFQIYNKDFSEHSKGKPNLHTLYWKALFSPDNLKDVIYKLNGQAEIFFRKKSLQYSDETLKRGHHADKLKDKFAYPIISNKRFAFDKFQFHVPITMNFKASGRDNINQEVIEFLKSVPENEIHFIGLDRGERHLLYLSMINSKGEILKQFTLNDIVNEYNNQKYTTDYHKLLAEKEKNRAESRTQWKTIETIKELKEGYISQVVHIVAKMMVENRAILLLEDLNFGFKRGRFKVEKQVYQKFEKMLIDKLNYYVDKSKSPTEPGGVLNALQLASKFTSFKDLGKQSGFIFYVPAWNTSKIDPVTGFVNLFNTKYENVANSQKFFEKFQDIRWNEAQNHIEFHVKNYTDFNPKAEGTRQNWIICSHGTRLENFRNEKQNSRWETREVPLTEEFLKHFHDHNIKPQTGLKEQIVARQDKQFFERLHHLLKLTLQMRNSSKETGEDYLISPVADEKGVFFDSRHFAKQEISEMPKDADANGAYNIARKGLLLLNKIKESKSDSKVDLKQTNKDWLNFVQKSTLK

SEQ ID NO: 6390 - protein, 700 aa, unidentified
  source 1..700: note = MG29-67 effector
NSYFLAIMDKQNNRIFENVPKIRNNQVVFKKVNYKLLPGANKMLPKVFFSKSRIKEFGVSAKMLENYKAGTHTKGNNFDISDCHQLIDFFKSAIQKHDDWKQFDFNFSKTESYEDTSGFYREVEQQGYKITFSDVPEEYIYQLVEEGKLYLFQIYNKDFSEHSKGKPNLHTIYWRSLFSPENLSNVIYKLNGQAEIFYRKKSINPEKATVHKANLELENKKCRDGLLSVFTTPEPKKYSIFCYDIIKDRRYTIDKFQFHVPITMNFKSTGNDYINPIVNEYLRNNKDIKIIGLDRGERHLIYLTLIDLQGNIILQQTLNTIKDDQHDIETPYHQLLDKKETERDKARKSWDTIENIKELKAGYISQVIHKIAQMMYQYNAIVVLEDLNFGFKQGRFKVEKQIYQKLEKMLIDKLNYLVVKENDANQPGGIYKALQLTNKFSSFKDMGKQTGFLFYVPAWNTSKIDPVTGFVDFLKPKYESIEQAKLFLSKFKKICFNTAKNYFEFSFDYSDFTTKAAETRTNWTICTFGDRIETFRNPEKQNKWDNRDVVLVKEFTGLFDKYNLNYKNGTDIKEQISKQTEKGFFEKLLYLLRLTLQMRNSKTGSDIDYLISPVADKNGNFYDSRNVETDKYLSLPEKKKNVQVVETYNYTPLPQNADANGAYNIARKGLWIIEQINKTDNLKKINLAISNKEWLQFVQK

SEQ ID NO: 6391 - protein, 1272 aa, unidentified
  source 1..1272: note = MG29-68 effector
MKSDFFKNFTSQYKLSKTLRFELKPIGKTLESIQSKGLLEKDEQRASSYKRVKKIIDEYHKYYIELALKNIQLSKLAEYYELFSQNKEVRNEDAFKNLKNELRKEIVKELTKGAYKEMFERLFSKELIKEDLKLWIKDRPEFQEELQFIKEFDNFTTYFTGFNENRRNMYTDQEQSTAIAYRIVHENLPKFIENIKMYESIKLKYPDLNFTPVLKDMEDLIQGKTLDEIFSLEYFNNVLSQHGIEFLNFIIGGRTREDGTKIKGLNEYINLYNQQQMEKNKRSPKFKQLYKQILSDRTSISLRFEAFENDSELLDAIEEFYQTELCEYESEGKTKNVFDEIKNLVTSIEAYDLEKIYLRNDTNLTNISQRIFGAFGVFKDAVSYYYDHVIDPQFQTKIAKAKGEKALKKLNDLKAKWNKEYISIAVLQTALDKYMESVDDSLEIKKTYTLKVIADYFKNHFKVIDEEKKETDLVYNIKSQYLGVKGLLNIEKSENKILAQDKEKVHQLKSFLDSILELNHFVKPLNLIADALLEKDEVFYSQFAPLYEQLNKLTPLYNMVRNYLTQKPFSTDKIKLNFENSTLLDGWDVNKEPDNSSVILRKEGLYYLAIMDKDNKRIFLNVPGIENETGFYEKMNYKLLPGANKMLPKVFFAKSRIDFFNPTQEILENYKNETHKKGDTFNIDDCRALIDFFKSSLEKHEDWKQFNFKFSPTNTYQDLSGFYREVEHQGYKMSFENIAADYINKLVEEGKLYLFQIYNKDFSTFSKGKPNLHTMYWKALFDEKNLANVVYKLNGEAEVFFRKSSIEEKNKVVHKANESIISKNPLTKGKLNTFEYDLIKDRRYTVDKFQFHVPITMNFKATGSEFINFQTNEFLKNNPEVKIIGLDRGERNLIYLTLIDQKGNILIQESLNTIKNKVRDIEINTPYQELLNKKEKERDEARKSWGTIENIKELKEGYISQVVNKIATMMVEHNAIVIMEDLNFGFKRGRFKVEKQVYQKLEKMLIDKLNFLVFKDKPSTDTGGLLNALQLTNKFESFQKMGKQSGFLFYVPAWNTSKIDPVTGFVDFLKPKYENIEQSQKFFSRFDMIKYNSSKDHFEFTFDYKNFTEKADGTRTQWTVCTAGNERYYYNPADKITSKINITEKMKELFEKENFNYKNGENIKQQITNSESKYFFIMLSKYLGITLALRYSNSADGRDFILSPVTNEKDEFYHSETADKLLPRDADANGAYHIALKGLWVLQQLAKQEDLKKIKLAIGNKEWLSFVQNKNY

SEQ ID NO: 6392 - protein, 768 aa, unidentified
  source 1..768: note = MG29-69 effector
LLHFLKPLYLKTDAEVQRDDLFCSTFTPLYEQLGSITKLYDKVRNFVTRKPFSTEKIKLNFKCSTLLDGWDVNKETQNLGILLKKENAYYLGIMNKSDNKAFSKLPEYSGPDAYQKVMYKLLPGPNKMLPKVFFSKSRIEEFAPDESIIEIYKKGSFKKGADFSVQDCRKLIDFYKASIEKHPDWKEFGFRFSPTEEYNDISEFYREVSDQGYKITFKAVPEIFIDSLVSEGKLYLFKIYNKDFSPYSKGKPNLHTLYWKALFDGRNLENVVYKLNGQAEVFYRKRSIPEDNRTIHPAGQPLSAKNPELQGKTSSFGYDIIKDRRYTVDKFQFHVPVTMNFTAAGTPRINEEVCDYIKNNPDINIIGIDRGERHLLYISMIDRDGNVVKDSSGRYIQYSLNTITGEYKNTEGEKVAFSTPYHELLGNRESERERARENWSVIENIKELKSGYLSQVVHHIAGLMADYNAVLVLEDLNSGFKNSRKKVEKQVYQNFEKAIIEKLNYLVFKDLSPDETGGLYHALQLTDRFASFRNLTKQSGFIFYVPAWNTSKIDPVTGFVDLIKPKYKNIPEAKEFFKKFESIKYNKEKDYFEFSFDYSRFTDKAEGTRTGWTVCTYGALRYAYEKSLNNGRGGYAKWNVTEKLKELFVRYGIDYKEGDLIGAIAEQNSSGFYATLIKCLQVTLAMRYSSAEDNKDFILSPVADRDGNFYCSEGRSDGLPQDADANGAYNIARKGLYVLNQIDRAENYKDWTTKISNKQWLSFVQSLN

SEQ ID NO: 6393 - protein, 1294 aa, unidentified
  source 1..1294: note = MG29-70 effector
MKKTLFDFTNIYSLSKTLRFELIPQGKTLENIEIKGLLKQDEDRAEKYKKVKIIIDEYHKDFIEKSLNGLILDGLHDYMSLYLMTIKEDKDKKAFDKEKEKLRKQIANAFKNNEKFKTLFAKELIKEDLMNFANEQDYEYIKAFKDFTTYFTGFHQNRENMYVVDEKATAIAYRLINENLPKFIDNLKIFEKIKNEAPGLINQLNKVLSEMEEIVQGKTLEEIFSLNYFNQTLTQTGIDLYNIVIGGRTPEENKIKIKGLNEYINTDFNQKQTDKKKKQPKFKQLYKQILSDRHSVSFMPESFENDNQLLESIEKFYTNELLHYSTEGKSINIFEAIKNAVGNLSSFNLSKIYLRSDTSLTDISQKVFGDWGMINKALQDYYEKIYPLKPKEKQEKYEERKNKWLKQDIDIQTLQTAIDHYENETVKEKNNGKIITDYFAKFGISDESKIDLLQNVYQNYNIIKDLLNTPFPESEKLGSNKELVSLIKTFLDSIMNVIHFVKPLSLKDSDKEKDESFYSLFAGLYDQLNHTISIYNQVRNYLTQKPYSTEKIKLNFENSTLMDGWDLNKEADNTTIILRKDNLFYIGIMDKKNNHVFQHIPERTDNEPHYDKMIYKYFPDASKMIPKCSTQLKTVVSHFESNITDKIIEGKSFDSALKITKRIFELNNFVYDDISKTMVLSEDNEKRPKMFQKKYLEISKDIDGFKDALKDWINFCIDFLNKYESTKHYSFNFKNSELYNSLDEFYGDIDTQTYKITYKNIPVSFIESLVNEGKLYLFQIYNKDFSPFSKGKPNLHTLYWKMLFDDENLNDVVYKLNGQAEVFYRKSSIKESNKIIHKANEVLTNKNPDNKKTTSKFDYDIIKDKRYTLDKFQFHVPITMNFKADGILNINPKVNEFLKNNPAVNIIGIDRGERHLLYYTLINQKGEILEQDTLNVIANEKQKVDYHNLLDKKEGIRAEARKDWGTIETIKELKEGYLSQVIHKLTDLMVKNNAIIVMEDLNFGFMRGRQKVEKQVYQKFEKMLIDKLNYLVDKNKNNNEQGGVLHALQLANKFESFKSMGKQNGFIFYVPAWNTSKMDPVTGFVNLFDTRYENLEKAKVFFNKFNSIHYNQTKGYFEFEFDYNNYTAKAEGTKTNWTLCTYQNRIETFRNPEKNNQWDNREIELTNEFIKLFEQHGIDYKNNNELKSAIVMQTEKAFFERLLYLLKLTLQMRNSITGTETDYLISPVVNDKGEFYDSRNANNLLPQNADANGAYNIARKGLWCLQQINKTDDLKKIKLAISNKEWLQFVQNNN

SEQ ID NO: 6394 - protein, 1274 aa, unidentified
  source 1..1274: note = MG29-71 effector
MNAQNSIWDKFTNMYSLQKTLRFELKPIGRTLKLIKEKNLIEEDEEREKEFNQIKKIMDDYYKEFIELCLSKLNIPNQEIEEFKKTYDTLKKDHKNEKLKEQYAKNQTALRKLIYNSIKKTNNFNYLFGKEFINQTLPNWLEEKNRLDDKKLVLKFKKWVTYFEGFFDNRKNVFSEREIPTSIIYRIVHDNLPKFLDNISKFDELEKLSDFDYKSIEDEFKSELNGKSLREFLSLNNFENCLNQSGIERFNLIVGGKTTENNVKIKGLNEKINEYSQKQKDNKEQKKIRTLKLSPLFKQILSNRESESFILEKIKDKKELFEKIDNFYKSFNEFSNKLKNSVEKLKNCNHDNVYVKNDKQLTKISQEMFGNWDEINSGLRAYYGSKPKKTIKSLMKSKYFSINEIEEGLKTLETDNKQSIVEHFLNFTKKYNNTNINLFADISEKATEFYKINRNEKEKLTEKNIETIKEFLDSIMALYHFLKPLHLDLRKTEKEKGSEALETDSDFYNDFNEVFEELSQIVPLYNKVRNYVTQKPFSTGKFKLNFENPTLANGWDLNKEKDNYAVILRKINQKTKKYDYYLGIMSGSDKKIFEKNKNKNNNNDYYEKIIYKLLPDPKKMLPKVFFCEKNKAFFKPSEEILRIKNSSSHTKHGSPKTGFEKKEFDLNDCHKMIDFYKTSLEKHEEWREFNFKFKETNKYEDLSEFYADVANQGYKLSFTNIDKNYIDELINQEKLYLFQIWNKDFSEYSKGRPNIHTIYWRELFSEQNLNDIVYKLDGKAELFYRDSSIEKKITHPKNTPIKNKNPIKNKETSKFPYDLIKDKRYSEEKFFFHCPITLNFKAKDQSKRIHKIVNNYIQKLGEKINVLGIDRGERNLAYYSLIDSEGKIIEQHSFNIISDKLKRKFNYQERLDEIEGNRDKARKNWKKIENIKEMKTGYLSQVIYNIAKLTIEHNAIIVLEDLNFGFKRGRFKIEKQIYQKFEKMLIDKMNYLIFKDRKENQTGGCFKAYQLTNKFESFKKLGKQSGIIYYVDAYKTSKVCPKTGFVNLLYPRFKNIQKSKEYLKKFKYIKFSPEDNLFELNFNYSNFFSENKNKLIRDNWSIWSNGIKLVQKRNKDKNNSWETKEINVTKELQELFHQNNIDYSSGENLIKQIINIENKSFYETLLNLIRLILKLRNSYSDYEIKNFKKNLGDQFNESNYDYILSCVKDKDGNFFDSRNAKDDEVKDADANGAYHIALKGLMLINKIKTADTSKKIDLRIDRNDYLNYIIKKAN

SEQ ID NO: 6395 - protein, 831 aa, unidentified
  source 1..831: note = MG29-72 effector
DETSANDVEVIKDFLDSIMNIYHFVKPLHIDFKKSEGDKGTDALDLNADFYNGFDEIFGKLGEIILLYNRVRNYVTQKPFCTKKFKLNFKSATLASGWDLNKEHDKNYSFIFKEGKSFFLGVINVEEDKNVLREDKHPEIFIKNSSFMKMIYKDLGNINKQISRLGFSEKAKKGVETVGWNPEIKSIKKEFEEFQKSKEKDKSGRSSNFDKDKLFKLIEYYKSVLKNHSEKYEETYNLSYKPTKDYKNLGEFFDDISSQTHKMEFVGIDKNYVNKLIDEGKLYLFQIWNKDFSDFSIRNEMDPNKKSKPNLHTIYWREIFSEENIKDPVHKLNGGAELFFRKASSKRDITHPKNQEIKNKNPINGKEKSTFIYDLIKNERYTEDKFFFYCPVTLNFKVGEKNKVLNRLVNKYIHNTNEEINILGIDRGERNLAYYVLIDSRGNILEQNSFNIISDDLHRKLNYQEKLDFIEGERDKARKTWKNIVNIKEMKTGYLSHAIHKIAKLAIESNAIIVLEDLNFGFQRGRFKIEKQIYQKFEKMLIDKLNYLVFKERNNNQSGGSFKAYQLTNKFDSFKKLGKQSGIIFYVDAYKTSNICPKTGFTNLLFPKFENVDNSRNFFKKFKFIRFKNDEDLFEFNFNLFDFSSENNKSRLLRDNWSVWSNGTKLIKTKDKENNYNWKTKEINVTKELKELFDYNEIKYTSAENIVDQIIRVEDRSFYEKLTELFKRVLQLRNSYTDYEIKEFKKKLGDGFRMSNYDFILSCVKDRKGHFFDSRNAQDHEVKDADANGAYHIALKGLMLIEKIKKSDTNEKLDLKIDRFDFINYAVTRAI

SEQ ID NO: 6396 - protein, 1260 aa, unidentified
  source 1..1260: note = MG29-73 effector
MKNFTNIYPQSKTLKFELRPQGATLDNIHKSGLIDQDETLKADYQAVKKMIDEYHKVVIDESLTNFKLTGLPAYEELYYKDRTEAEDKTFEKIQSNLRKQVHKAFGENKRYKSIFKKELIQKDLPDFVNKEEEREQISRFYHFTTYFTGFHENRKNIYTAEAKATSVCNRLIHENLPKFLDNRKTYLNYISNFGDLDMSQAEEDLQEVLGGIKVGELFSLDFFNHTLTQQDIDIYNIALGGRSVEGGKKIQGINECINLYRQNNQLKARQLPNIKPLYKQILSESESGSFLLDKFEKDEDLFDGLRNFYQGLNSFNYKGEQDKSTFIELMNLFGRFSESDMTRVYLRNDASLSRLSKKLFGDWSLIVSALRYYYDAEVNPLMGKKATNKYIKEKENWLNKSRDFSIDIINKSLLRYGTINETVNSQFTDDIIFEHFSSFMIEEKNLLNTVAENFMLVSEVLSRGSLDKDQNKKKKEIKTIKTFLDNVLDLLHFIKPLSVQHVGAEKDEGFYSDFDVLYDQLSQVIPLYSKTRYYLTKKPYSVAKFKMNFKNNTLLDGWDVNKETANKGVLLQKEGLFYLAIMNKDHSKSFYNIMDTGDTTGYQKMDYKLLPGPNKMLPKVFFSVKNLGFFNPSEKVLRIRNTSSHSKNGNPQEGFDKADFSLNDCHSLIDFFKASLDKHADWKKFAFDFSPTQSYNDISEFYREVENQGYKITYTNISDEYIHELVNEGKIYLFQIYNKDFSPFSKGKPNLHTLYWRALFDEKNLEDVVYKLNGQAEVFYRKKSIEYSEEKWIQGHHYDQLKDRFAYPIIKDKRFAFDKFQFHVPITMNFKASGSPVINMKVREYLKTNPDVKIIGLDRGERHLLYLTLIDQNGNIEEQYSLNEIVNSYNGKVHKKDYQQLLHEKEGDRKKARENWETIETIKELKEGYLSHVVHKIVNMMVEHNAIVVMEDLNFGFKRGRFHVEKQIYQKFEKMLIDKLNYLVLKDTQDPKAPTGLLNALQLSNKFESFQKLGKQSGFVFYLPAYLTSKIDPATGFVNQLRIKYDSVVKSQAYYRQFDRIVYNTTTDWFEFGFRYVNFGNTTPSVRQEPWTICTTHHPRYAWNKNSNMGKGGTEEYNITEELKKLFDHHNIAYEEGTDLIESIASNTGTDFFKRLNKLLNVTASLRHNNGKKGKEERDFILSPVANSEGAFFNSLEADETQPENADANGAYHIALKGLWALQSIRKTDTDRMAKLNLVVSNEEWLNFAQAKQYRSQSSS

SEQ ID NO: 6397 - protein, 1341 aa, unidentified
  source 1..1341: note = MG29-74 effector
MGIGKIDNMLKEELKTSISKEGGNNNNSKSLTFYNVSNFEKSKESIWDEFTNLYSLQKTLRFELKPLGKTKEFIEKKGLVEEDEEREKEFNQVKKIMDDYYREFIEICLSEIKIETEDIEALERVYNGLKKDTKNQTLREEYTKYQKDLRAKIYDKIKKIKNFGVLFGKDFINKILPDWLDCKNRQQDKDLVLKFKRWVTYFNGFFKNRKNIFSEKEIPTSIIFRIVHDNMPKFLDNVSRFKEARKLIDFDYKKIEENFKSELNGQSLEEFFSLDNISNCLNQAGIELHNLLIGGKSLEHNLKIKGVNEYIEELSKTLQEKTEQKKIRKLKLSPLFKQILSDRESASFVLEQFKDKNEVFQKIDEFYVHFNNISDKIQSVIAKLKECDVDSVYLKNDNNLTKISQNIFGDWNKIHEGLKEYFILESKSKDLTEKQCIKEVEKKMKSKYFSISEIEGGISLINVEKKQSLIDYFLNFSGVIDNANMNLFEDLKEKYSAFKQIDRNKDGDLKDETSANDVEVIKDFLDSIMNIYHFVKPLHIDFKKSEGDKGTDALDLNADFYNGFDEIFGKLGEIILLYNRVRNYVTQKPFCTKKFKLNFKSATLASGWDLNKEHDKNYSFIFKEGKSFFLGVINVEEDKNVLREDKHPEIFIKNSSFMKMIYKDLGNINKQISRLGFSEKAKKGVETVGWNPEIKSIKKEFEEFQKSKEKDKSGRSSNFDKDKLFKLIEYYKSVLKNHSEKYEETYNLSYKPTKDYKNLGEFFDDISSQTHKMKFVGIDKNYVNKLIDEGKLYLFQIWNKDFSDFSIRNEMDPNKKSKPNLHTIYWREIFSEENIKDPVHKLNGGAELFFRKASSKRDITHPKNQEIKNKNPINGKEKSTFIYDLIKNERYTEDKFFFYCPVTLNFKVGEKNKVLNRLVNKYIHNTNEEINILGIDRGERNLAYYVLIDSRGNILEQNSFNIISDDLHRKLNYQEKLDFIEGERDKARKTWKNIVNIKEMKTGYLSHAIHKIAKLAIESNAIIVLEDLNFGFQRGRFKIEKQIYQKFEKMLIDKLNYLVFKERNNNQSGGSFKAYQLTNKFDSFKKLGKQSGIIFYVDAYKTSNICPKTGFTNLLFPKFENVDNSRNFFKKFKFIRFKNDEDLFEFNFNLFDFSSENNKSRLLRDNWSVWSNGTKLIKTKDKENNYNWKTKEINVTKELKELFDYNEIKYTSAENIVDQIIRVEDRSFYEKLTELFKRVLQLRNSYTDYEIKEFKKKLGDGFRMSNYDFILSCVKDRKGHFFDSRNAQDHEVKDADANGAYHIALKGLMLIEKIKKSDTNEKLDLKIDRFDFINYATKRYI

SEQ ID NO: 6398 - protein, 1283 aa, unidentified
  source 1..1283: note = MG29-75 effector
MNNSIWNEMTNKYSLSKTLRFELKPIGKTEEFIEKNGLIIEDEQRNRDFLYGKELLNEYYSYLIEKRLGEIKIDLGILKDYYEKYKNFSKLKQKGKVVDSKELKKSEIELIDIQNHLRKALHKVFFFDKNLSDKRDEKDIIAAVKYHVENGLVKEKSDRLNNFITNRCTTYFTGFFNNRDNVFTSDEIPASVFYRTINENLPFFIKNIEKFEKLKNLIPENEFIALEKNLKNELGEFSVKEVFSIKYFNNCLNQKGIDKYDQIMGGIKKETIQIKGFNGLINEFSQKGDKNIRKLRMTVLYKQILSKSDSKSFKIESIKNGKELKDIINGFYDSICSLNKDLDESIIISLENLLKADKDLDLSGIYINSKKLKDISNKVFGDWYLIESALKQQYKSQIKSKGKKEKTESKKDEETEEWFKKLKQFSISEINSSLSNIENDLVTKENNTIWTYFSTFEDSNGKNLVNEIKNSFKELKTIQFGEDKELLNDDNEENVRKIKKALDSVQELFWFISPLMYDKPKEEVFDLDLDAGFYEKFNVIYEGLRQIIPLYNKTRNFIAQKPFNVSKFKLNFENSTLLNGWDRNKEADNWSILFRKDDNYYLGIIASGKGNNKIFEKIPEYKEGDYYEKMNYILWSNPSRMLPKVFFANTNFDLYNPSEEILNIRKNSSFTKNGEAQKGFDKNEFNLNDCHKMIDFYKNCFNKHPRWSNFGLVFKNTKDYLDISEFYKDVADQIYQLSFQKVSSKFVDELVNEGKLYLFKIWSKDFSEYSTGKPNLHTMYWRELFSDNNLNNVVYKLNGQAEIFFRKKSLPIKITHPKNINIKNKDPIKDKENSVFKYDLIKDKRYTENKYLFHCPITMNFKAKGNSFINNEINEFILKNHNKINILGIDRGERNLLYCSLLDPSGKILFQKSFNVMPDKFGRDVKYYDKLDAKEKERDKARKEWKNIKNIKELKEGYLSQIIHEIAKLVIRYNAIVILEDLNFGFKRGRFKFEKQVYQKFELKLIEKLNYLAFKDKKPTETGGLLHAYQLTNEFESFKKLGKQSGILYYVGASYTSKIDPKTGFVNLLHPNYENLNKSKEFFEKFDSIKFNKNEDMFEFDFKYSNFNKESKLEKDQWEIFTNKERIIHERTSNNNYSPKNINLTEEIKKLFDNERIPFADGINLKEYIISSDSKNLHKGLINLLKYTLQLRNSNSETGEDYILSCVKYDKKNFFDSRNAKENEPKDADANGAYNIGLKGLMLIEKIITQNNNKKQINEKQKYDFKMSNEEYFNWVIRRNLTK

SEQ ID NO: 6399 - protein, 1288 aa, unidentified
  source 1..1288: note = MG29-76 effector
MDSNITSFSFKYSLSKTLRFELKPVGKTLENIQNKGLIAKDEERSKSYARMKKTIDAFHKYFIELAMKEVELTKLNEYVEHYYESAERKKEDSFIKSFDKVKADLRKEIVKGFNSDKVKEIFSKIDKKELITELLEDWIQNQPNKEEIYFDEGFKTFTTYFGGFHENRKNMYSDKEQSTAIAYRLIHENLPKFLDNIKNFEDAVQKLGEEKIAEIEKTLEPILQGKTLGEVFILEYFNHTLTQTGIELYNTILGGYTQNEGRIKIQGLNEYFNLYNQTQQDKKNKAAKLKPLYKQILSDRGTTSFLIEKFENSQEVLDAINEFYLFNLIEYKPEDKDETENVLSKLKELLAELSQYDLSKIYLKNDRAITDISQTIFGDWNIIKVALEQHWLNANTDKNKALTKKQEEAKSKFLSKSQFSIAEIEAALFAYKNEADVLKDLKESDHPIADYFKTHFKAKKEKETDKDFDLIANIDAKHSCIKGVLNSDYPEDKKLYQQQKDIDNIKIFLESIMELLHFVKPLALTKGNSLEKEDKFYGQFETWFEQLSLLTPLYDKVRNYATQKAYSIEKFKLNFESGYFFSGWGIDYDSKSCLVVIKDENYYLLIVDKKLQKSEIEFLKENVNKNPAQRVIYDFQKPDNKNVPRLFIRSKGDRFAPAVHRYNLPIDSIIDIYDNGYFKTEYRAQNLSHFKECLSKLIDYFKLGFERHESYKHYQFNWKNSTQYNDIAEFYKDVINSCYQLKLEEINFDNLLELINLQKGYLFQIYNKDFSEYSKGKPNMHTMYWRALFDEENLKDVVYKLNGEAELFYRKKSIDDDKKIIHKANEKLANKNPLNPKRESKFEYELIKDKRFTVDKFSFHVPITMNFKADGNDYINQDVLKFLKNNPDVNIIGLDRGERHLIYLTLINQKGEILDGLQFSLNEILNTYKNSKGENVELKTSYHTLLDAKEKERDEARKTWKSIENIKELKEGYISQVVHIIAKMMVEFNAIVVMEDLNFGFKRGRFKVEKQVYQKLEKMLIDKLNYLVFKDVEESKSGGLYNALQLTNKFTSFKEMGKQSGFLFYVPAWNTSKIDPTTGFVNLFDTRYESIEKAQQFFKKFKSIQYNSQKQYFEFAFDYSEFTNRAEGSKTNWKVCTQGDRIITFRNPESNNQWINKKVNLSQEFEDFFGKHNVIYGNGENFQPQIEAQTTKEFFEKLLQLFKLTVQMRNSKSDEDYLISPVINKTGEFYDSREANDTLPKDADANGAYHIAKKGLWVLEQINETEDYKKLKLAISNKEWLQFVQKNN

SEQ ID NO: 6400 - protein, 1290 aa, unidentified
  source 1..1290: note = MG29-77 effector
MQKNVFDTFTCLYSLSKTLRFELRPIDENGRWITDQRFENFTSALQGIIGNDNQRAKYYKQAKPLIDEYHRYYIDEKLESPVDPKTDEAVLDEDNIVKAFECYRELRNAAGNRRQDTEAFQAAQKKWSKFQDVLRKSLVKCFGDKKDHLFSKTLIKSTLPEWLEKQGRWEENRACVEAFEKFTGYFIGYNQNRENMYVDEPQKTAIAFRLMNENLSKFFNNCLAYEKIRKNHSDLVFSADNEIPEKSHVADVLTILEPGFFLKLFTQSGIDAYNTLIGGINKQINLYRQKHDIKPRNLPNLTPLYKQILSDRESHSFILEEFENDQNLLDTLRDFVNPARALIEKLKTTLETLPDSDLDRVYIRGSELRTISQWLFNDYSFIGSAQTLHAENIFPSSPKGKVTKKLEKEREKYPKQDVFSIAELDDALKSYIELRKQESPDEEFLSGVDTNFPVRNYFLTEAKKWKNHQGLQDAIQKFETVCSSNKISADRRAPGSDNETDGGGEGYRQVQSVRNMLDEFMTFLQLTRPLHLVRKGKPIDIPDMDMSFYADFSAAYENYQDRLLPLYNKTRNYLTKKPYSPDKIKLNFDKPNFLEGWDLNKEKANLGVLLRRDDNYFLAVMRPEHNNVFRNYPTPEGDEEIYGKINYKQISGMNKMLPKVFFSKKWRKEHDVPGEIDTLYKNEEHIQNENFNQESLHKLIDFFKARINEYEKDGFPWRNFDFHFPDTKEYQNIADFYREVEEQAYKIWFIKVPVSHIENLVREEKIFLFQIYNKDFSQHSKGRPNLHTLYWRALFEKKNLNNVVIKLNGGAEVFYRPHSIKENERIIHKAHQSLNNKNKNNPRKTSCFAYEIVKDRRYTQDKFLFHVPLTLNFKAPKAKSLNDCVNNAIRNEPDVHIIGIDRGERHLLYLTVIDQKGNIVKQCSLNEIETDKNYNVQYREKLDQKEKERDKARKSWSSIENIKDLKSGYLSQIVHSLAKLIIEYNAIVCLEDLNFGFKRGRFMIEKQVYQKFEKALIDKLNYLVFKDAKPGQAGHYLKAYQLTERFRSFEKLGKQSGILYYVPAAYTSKADPATGFVNFLYPKYESLEKSKQFFSKMELIRYNTGDEYFEFTFKYSNFPIRQDLKNYPDEWTICTHGDARYWNKRENNRWISEEINVTQQLAALLDSKNIDYRDGRDIKQDIAAAKDTKFYKKLYRLLQVTLSLRYSKSGTDIDFILSPTRDKSGTFFDSRQAPSTMPENADANGAYHIALKGLWHLQQLRKQEEGQNLKLEKITNSEWFDFLIQQVKKS

SEQ ID NO: 6401 - protein, 706 aa, unidentified
  source 1..706: note = MG29-78 effector
FTKTTPEVHLAHHVIYAFPKPENKNVPRILIRSKGTSFAPAVQKYDLPVESIIHIYDEGLYKTDFKKENPAVFKKSLVQLIDYFKLGFSRHDSYKHYDFEWKESEEYENIADFYQDVINSCYELRDEAINFDHLHQLIDQGKLYLFQIYNKDFSKHSKGKPNLHTMYWKALFEKQNLKDVVYKLNGEAEMFYRKKSIQDKNRVVHKKNIKVARKFYKDDKKTERVPDETVLRLNKFYKGQIQESGLKKEDLKFKDNYSLFHEQGKDIDLIKDKRYTVDKFQFHVPITLNFKAKGNDYINNEVLDYLKDNPDVNIIGLDRGERHLIYLTLIDQEGNIIEQETLNSIVNKKHAITTNYHQLLDDKERERDKARKNWGTVETIKELKEGYISQVVHKIAKMMVEHNAIVVMEDLNMGFKRGRFKVEKQVYQKLEKMLIDKLNYLVLKDKKPDEPAGIYNALQLTNKFESFQKIGKQSGFLFYVPAWNTSKIDPTTGFVNLFHVKYESVNKAKTFFSHFKSIRYNKNQGYFEFDFDYNDFTTRAEGTRSEWTVCTYGERIKTFRNPDKVNQWDNQEINLTEAFEDFFGKHEIVYGDGTDFKDQISVKDNKDFFAELIHLFRLTLQMRNSITNSEVDYLISPVKNSSGTFYDSRKADASLPKDADANGAYHIAKKGLQWVNQIQEFDGDDWKKLKLNKTNKGWLKFVQCNT

SEQ ID NO: 6402 - protein, 791 aa, unidentified
  source 1..791: note = MG29-79 effector
TKNLIQEKENVAEIKTLLDLIMELLHLCKLFVIKADIAEKEHNFYSELEYCLELLNPIIALYNQTRNYLTQKPYSLEKFKLNFENATLLDGWDRNKETSNTSILLRKNGNYYLGIMNKRHNRVFEALPQILKTNNSYEKIVYKLLPGANKMLPKVFLSTKGKATFQPSQEILDNYKSETHKKGDNFNLDHCHKLIDYFKDSINKHSDWKNFNFNFSETSSYEDISGFYREVEAQGYKIIFDLISEQYIDELINEGKLYLFQIYNKDFSPHSKGTPNMHTMYWKALFSEENLANVVYKLNGQAEIFYRKKSITADKTIKHLANQPINNKNINNAKKQSTFAYDLIKDKRFTMDKFQFHVPITLNFKAQGRDDINLEVKEYLKSNPHTHVIGIDRGERHLLYVSVVNPQGEIIKQFSLNEIINEYKGNTYKVDYHNLLNNKEGDRKKARENWGVVENIKELKEGYLSQVIHKICQLVIEYQAIIVMEDLNSGFKNSRIKVEKQVYQKFEKMLIDKLQYLAFKNPQENQPSIYGALQLASKFESFQKLGTQSGFIFYVPAWNTSKIDPATGFVDLLKPKYETVAKAQEFIHKFDDIKYNQSKDWFEFNFNYSKFTEKADGTRLNWTICTTNINRYSWNRKLNNGKGGQQLFEITKCLKALFDNYKINYQSGENLVVQIATQSEKDFYVCLLKYLSITLNLRHNNGKSGIDEEDYIASPIADNAGAFFDSRNEVIKGKNEIGDWLSKLPVDADANGAYHIAKKGLWVLHQLEKADNLRKVKLAITNKEWLEFTQN

SEQ ID NO: 6403 - protein, 1274 aa, unidentified
  source 1..1274: note = MG29-80 effector
MKLNKFTHQYPISKTLRFELKPVGETADYIEDFKSQYLKDIVIQDQQRAEDYESIKVIIDEYHRHYIEEKLSEPFDKKTGELFISGDEFENAFSYYQRFRENSKDEKARKEWIEVQNSLRKSLVKVFSDRKKRLFQKELITKELPSWLKEKGEWEDKKNVVENFNRFTTYFTGFNENRENMYSHEEQSTAISFRLMNENLPKYFNNCIQYHKAIESYDGLSFTVNPDLLNEMGVSILSEIFQPSYYIQLFTQSGIDKFTELLGGFTKENGEKVQGLNETINLFRQQKAIKAKAFPNFISLYKQILSDRETSSFIPDQFENDNDLLKSLGKFIKEMVKEDGLFKKLEDSIKLITDADLHRTFIKNGVEITKISQSIFGNYSILKSAIYHHAESVLYPDPISGKISEALKEKRIKYVNKQVVFSIAELETILSNYASQMTDDNPDKEIIAQCENSEHPIRTYFLNAIENVKNDKDIEFGKAIENVLPLISLENLNKGKDGQAQTHKIQKMLDAFLAVTHAVKPLHLVKGRKPIDIPDMDMGFYAEFSKAFENFEQLVITLYNKTRNHLTKKTFSTDKIKINFENPTLLDGWDANKEKDNSGVLFEKDGNYYLGIMHPKHKNIFNYIKGINDIESEKRSLSKDELFNKIVDGESEHYQKIVYKLLPGVNKMLPKVFFSGRRIDFFAPSTEVLKIRNSASHSKNGSPQKGFEKEDFNLKDCHTIIDFFKKSIEKHPEWKEFEFEFSPTSSYEDLSGFYREVEHQGYKMDFHPIKKSYIDQCIEEGKLFLFQIYNKDFSPYSKGKPNLHTLYWKALFDTENLKDVVAKLNGQAEIFYRKHSIKKDERTIHRANKSLQNKNENNPKKTSLFEYDIIKDRRYTVDKFQFHVPITLNFKMEKMTQFAHNEKVNQMIVKSENTHVIGIDRGERHLLYYSVINPKGHIVEQGTLNTISTDKGYEVDYQQKLDSKEKARDTARKSWTTVENIKELKAGYLSHVIHKIAFLIEKYNAIVCLEDLNFGFKRGRFKVEKQVYQKFEKALIDKLNYLVFKDAKPNEPGHVLNAFQLTAPFDSFKKLGKQTGLLYYVQASYTSKIDPVSGFINFLYPKYESLLKSKIFFESMDGIRYNADKDYFEFSFDYRKMTPNRNLEGYQTKWTACTFGEKRFKNIRNAHGNWESVEVNVTEALKKILKNEDVDFKSGHDLRFEISKVKSTKFYKKLFKLLQITLSLRHSKTGTDEDFILSPIVDENGKFFDSRNATKDHPMDADGNGAYHIVLKGL

SEQ ID NO: 6404 - protein, 787 aa, unidentified
  source 1..787: note = MG29-81 effector
NYPPTITYSDEVKKILKRLPDRNAGDDSVTICSTDDAMEPKKSIWDDCTNLYSLQKTLRFELKPIGRTKDFINQKRLIEDDEELAKKFNEAKKIMDDYYKFFIEDRLKKVRIEECDLKEFKKIYQDLKQSRGKDKKIRAEFSELQEKIRNDIYKKFFTETLEKFLFEKNFLTKILSEWLESNNRKEDSNTIEEFQRGTTYFTGFFDNRKNVFSKDDIHTSFIYRIVHDNLPKYIDNLERYDKLKQYSDFNYEQIGKDFSSELKSQTLSEFFTLENFNECLNQSGIERFNLIIGGKSLNNNKKIQGLNEAINLYSQKTNEENKRAVRKLFMRPLFKQILSDRTSASFILSVIEDDAAVIFSINELYSNISKDFDLLQNIFKGLFEFNTGQIYINKKLLNHVSKQIYDDWGILEISLKCFAKEKLNLTTEKKIEEWFKKSAYFSLEEIKQGIECLKSENAAWEKFVEYHRAITRDNKQLIDAIKEEYTAVKGLNLNKGERTLLTEQKEDDVTKIKQFLDSVMNIYHFLKPFIMVLDADSEKESFTVEIDTEFYKDFNDIYDRLCEVVPLYNKVRNYVTQKPFRTNKFKLNFNESTLLGGWDKNKEHNKNYSFIFRENDSFFLGITNTDEDKNILREDKHPEIFVENSLFKKMICKDLGDIKMQLPRIGFSDKAKNGVEDVGWNQEIQEIKNEFDSFQEQKKNDKDLWTEKFNRDKLFRLIDYYKGVLKNHSERYEKTCNITYKSTSNYRNLGDFFNHVSFQTYNVKFVGIDKSYIESLVSEGKLYLFQI

SEQ ID NO: 6405 - protein, 1283 aa, unidentified
  source 1..1283: note = MG29-82 effector
MKNLSEFTNLYSLQKTLRFELIPVGKTQKHIEYNGIIDCDTKRAESYKKMKKTIDKYHKDFIESSLRKASLSGLDEFYVLYTSNTEEKKTDAYKKRFSAAKQSLRKEIVKRFKDGPKKDIFKNLDKKKLIQDELEKWLQEKDNELYFNSDFKSFTTYFTGYNTNRMNMYSDEEKSTAIAYRLINENLPKFIDNMLIFEEIKNTTIYNKFPQIYEEIKEYLYVTRIEEIFELEYFNNTLTQTMIENYNAILGGVKIGNRKIKGLNEYINEYNQKSKDKRIPNLKMLYKQILSERETFSYLPEEFESTQEMLDAIAKFYENQLCSYSDEYSGEEINIVDSLKSIVSSLREHKLNKVYIRNDSSVDTISNRLFGDFSVIKASLEYYYENVVAPGFQESYKKASDKKRKQLEKQKKDYISGPAYFPIGLIQDALGCYVEQLDKNEYANIHAKYSDSCVADYFSAFEAKDGVNLINELNQKYKKAQDLFNISFPDGYNLLDYEKGILKAFLDSILSLLHFVKPLYLTPDSELSKDELFYSAFSPLFEQLQKITEIYDKTRNYLTKKPYSTEKVKLNFSNPTLLEGWDVNKEPDYGAVLFERDGLYYLGILNDRNLFKNIESRFDLHSSEKGSYRKIVYKQIPDAAKYISSKQILPQNPPQKIINILEKKKTNAQSLKREEIHSFIDYCKNDFLKNYSCLKDANGKDYFDFNLKPADEYETLKHFFDDVKKQAYSISFLGITEKFINEAVEEGKLYLFKIWNKDFSSFSKGKPNLHTMYWRALFADENLKNVSYKLNGNAELFHRKASISKDNMVIHKANQPIACKNPNLKQKTSVFEYDIIKDRRYTCDKYQFHVPITLNFKANGQTNINERVLKYLKNNQDINVIGIDRGERHLLYISLLNREGNVIMDEDGNPLQYSLNDIVGVYRDNSGALVSIKTPYRELLDKREIKRKDARKNWETIERIKDLKEGYMSQVIHHIAKLMVKYNAIIVMEDLNSGFKNSRVKIEKQVYQKFEKLLINKLNYMIFKDLPEKEPGGLYKAFQMTNKFESFKRMTRQNGFVFYVPPWNTSRIDPVTGFVDLLKPKYTNIPDARSFFSKFDSISFNSQSDYFEFEFDYSQFTEKANGTRTRWTVCTYGNERYTYNRSLNGGLGGYEKWNVTEKLKSLFDNVSIYYNSEENLIPQIISQENSAFFLELIKNLKITLALRYSDGNDRDFILSPVSNEGRFFYSEECEKTLPQDGDANGAFHIARKGLCLLKKIDLMEDLKKPDLKISNKEWLSFVQTRLV

SEQ ID NO: 6406 - protein, 1309 aa, unidentified
  source 1..1309: note = MG29-83 effector
MKLNKFTHQYPISKTLRFELKPVGETADYIEDFKSQYLKDIVIQDQQRAEDYESIKVIIDEYHRHYIEEKLSEPFDKKTGELFISGDEFENAFSYYQRFRENSKDEKARKEWIEVQNSLRKSLVKVFSDRKKRLFQKELITKELPSWLKEKGEWEDKKNVVENFNRFTTYFTGFNENRENMYSHEEQSTAISFRLMNENLPKYFNNCIQYHKAIESYDGLSFTVNPDLLNEMGVSILSEIFQPSYYIQLFTQSGIDKFTELLGGFTKENGEKVQGLNETINLFRQQKAIKAKAFPNFISLYKQILSDRETSSFIPDQFENDNDLLKSLGKFIKEMVKEDGLFKKLEDSIKLITDADLHRTFIKNGVEITKISQSIFGNYSILKSAIYHHAESVLYPDPISGKISEALKEKRIKYVNKQVVFSIAELETILSNYASQMTDDNPDKEIIAQCENSEHPIRTYFLNAIENVKNDKDIEFGKAIENVLPLISLENLNKGKDGQAQTHKIQKMLDAFLAVTHAVKPLHLVKGRKPIDIPDMDMGFYAEFSKAFENFEQLVITLYNKTRNHLTKKTFSTDKIKINFENPTLLDGWDANKEKDNSGVLFEKDGNYYLGIMHPKHKNIFNYIKGINDIESEKRSLSKDELFNKIVDGESEHYQKIVYKLLPGVNKMLPKVFFSGRRIDFFAPSTEVLKIRNSASHSKNGSPQKGFEKEDFNLKDCHTIIDFFKKSIEKHPEWKEFEFEFSPTSSYEDLSGFYREVEHQGYKMDFHPIKKSYIDQCIEEGKLFLFQIYNKDFSPYSKGKPNLHTLYWKALFDTENLKDVVAKLNGQAEIFYRKHSIKKDERTIHRANKSLQNKNENNPKKTSLFEYDIIKDRRYTVDKFQFHVPITLNFKMEKMTQFAHNEKVNQMIVKSENTHVIGIDRGERHLLYYSVINPKGHIVEQGTLNTISTDKGYEVDYQQKLDSKEKARDTARKSWTTVENIKELKAGYLSHVIHKIAFLIEKYNAIVCLEDLNFGFKRGRFKVEKQVYQKFEKALIDKLNYLVFKDAKPNEPGHVLNAFQLTAPFDSFKKLGKQTGLLYYVQASYTSKIDPVSGFINFLYPKYESLLKSKIFFESMDGIRYNADKDYFEFSFDYRKMTPNRNLEGYQTKWTACTFGEKRFKNIRNAHGNWESVEVNVTEALKKILKNEDVDFKSGHDLRFEISKVKSTKFYKKLFKLLQITLSLRHSKTGTDEDFILSPIVDENGKFFDSRNATKDQPMDADGNGAYHIALKGLWNLEQIRNWDGESRLNLAMKNVDWFSFAYQKPFKK

SEQ ID NO: 6407 - protein, 923 aa, unidentified
  source 1..923: note = MG29-84 effector
LSSFTRKYPLSKTLRFELKPVDDTKKYLKEFVQYDQKRAEDYKKLKTIIDEYHKDYIEKSLSKNDILSLDDLNSLKEHIEKSGSLQLLEEKQKKEKSIKELQNTLRGQIVKDFQIDTKQEKDRLFGAKLIKDVLPEWLDSGSLENIEYKKEIVKEFQKFNTYLTGFHENRKNIYSDKEQSTAVSHRIINENLPKFLSNLNTYEKIKTNFPELKAQFESLKKDLKAEFEYFKIQNIKDLFKIQFLNKCFTQTGIDNYNSIVGVRVLESGQKIQGINEKINLFRQAQSSKGNQETRKISNTSLPVMQTLYKQILSDRESHSFYFEEFKSRNEVLESINCYWESIFNKERQSEYIAKRQTRHKEGDQSVLQRMENLFTNLDKYELDKIYFKSNDLSFVSKKLFEDYSVIGSALNFHAENKFSKKKEKEQYVKKDFFSFDEIQTSLSDYLKENEEIKFSSRFPGLKEIEKDLSVDPKKEQSNVLVVYFNLEFSKKKYNNKSLLDFIEELYKHVKKEIPPSLQTQNEFNKKEVQIIQNYLKPFIPNCPENSDSYNGKEKNETLKQGQYNTERGSVGLMDLLHLIKPVYLEKDKKKIMDLEKDASFYNEFEELYNKLSQIIPLYNKVRNYITKNKRCTEKIKINFEKSTLLNGWDINSETDYLSVILRKKDKVIGWKYYLGVMNTHRFEKANRMFDYHIKSDKSDKKQQEELRQKILHKEDNENFYEKMNYKLLPKPSKMLPKVFFSKRNLSFFSPSPEILEIKKSKRSYSKNNGDTFSLNDCHKLIDFYKKSIQKHKEWGAIFNFNFSHTRNYRDISEFFAEVASQGYRLSFDKIKSSYIEGKVKTGEFLLFEIYNKDFSTHSKGRPNLHTSYFKLLFAEENLKDIVYKLNGHAEIFYRKASKQKKISYKAQVPIKNRNPDNQKKTSQ

SEQ ID NO: 6408 - protein, 1027 aa, unidentified
  source 1..1027: note = MG29-85 effector
LRKEIVKGFSIGEAKEIFNKIDKKELITDLLEQWVKKQSDDFYFDENFKNFTTYFGGFHENRKNMYSDKAQSTAIAYRLIHENLPKFLENIKIFERIKAVPKVYEKCQTLYKEIEEYLNITQIDEAFELDYYNEVLTQTQIDVYNLIIGGRTAEEGKKKIQGLNEYINLYNQKQEKNKRLPKLKLLYKQILSDRISTSFMAESFSEDQEVIDAIEEYYKFHLLAFQAEDKDDTENILEKVKELLSNIKEYDLSKIYLRNDTKITAISQKIFGNYGVFNTALEYYYATAVKPDFQKEYEKANQKKRDTLDKAQTQFVKQPYVSIELLQTAIDAYIATIDKGEEIYKRYSPTCIADYFKNNFKAEKKEKNDKEYGFIDNIKAKYSCIQGILGTPYPKDKKLIQQKNDIPNIKAFLDSLMELLHFTQPLSIVDEREVTKILTSDRLKIDKEWAEEANKSFFEKDKKFYEQFDLYFKELQKLIPLYNKVRNYATKKPYSTEKFKLNFENKGQFLGGWVDSHTENSDNATQAGGYLFRKKNQIGEYDYFLGVSSDSKLFRSHLRNEIVDEDKSEFERLDYYQLKSASVYGNSYIGNQSYDKDKENLFDSIIEFANRNNPAAKEDFNKYISSQKGDNKPTPNGLLKILQEKHSKALEELMIDGDFIRINTIVTDNLKNTILSLNRIPKSQEYKNTIFTLFTEPIQVIEELSKEKSFSYFPVSAKELEDSLNRELKPLLLFKISNQDLSYADSFSQGKRKSRGRENMHTLYFRQLMSGSQNILDIGTGEVFFRKSSIENPTIHKANEAVTNKNPLAKKKDSAFEYDIIKDRRFTVDKFQFHLSIIMNYQKPQKASDFNFEVLEFLQNNPNVNIIGLDRGERHLIYLTLINQKGEILLQESLNNISSENYPITTPYHDLLATKEKERDEARKSWGTIENIKELKEGYISQVVHKIAKLMVEHNAIVVMEDLNFGFKRGRFKVEKQVYQKLEKMLIDKLNYLVFKDKDPNEIGGLYKALQLANKFESFQKMGKQSG

SEQ ID NO: 6409 - protein, 1266 aa, unidentified
  source 1..1266: note = MG29-86 effector
MKLNKFTHQYPISKTLRFELKPVGETADYIEDFKSQYLKDIVIQDQQRAEDYESIKVIIDEYHRHYIEEKLSEPFDKKTGELFISGDEFENAFSYYQRFRENSKDEKARKEWIEVQNSLRKSLVKVFSDRKKRLFQKELITKELPSWLKEKGEWEDKKNVVENFNRFTTYFTGFNENRENMYSHEEQSTAISFRLMNENLPKYFNNCIQYHKAIESYDGLSFTVNPDLLNEMGVSILSEIFQPSYYIQLFTQSGIDKFTELLGGFTKENGEKVQGLNETINLFRQQKAIKAKAFPNFISLYKQILSDRETSSFIPDQFENDNDLLKSLGKFIKEMVKEDGLFKKLEDSIKLITDADLHRTFIKNGVEITKISQSIFGNYSILKSAIYHHAESVLYPDPISGKISEALKEKRIKYVNKQVVFSIAELETILSNYASQMTDDNPDKEIIAQCENSEHPIRTYFLNAIENVKNDKDIEFGNAIENVLPRISVENLNKGKDGQAQTHKIQKMLDAFLAVTHAVKPLHLVKGRKPIDIPDMDMGFYAEFSKAFENFEQLVITLYNKTRNHLTKKTFSTDKIKINFENPTLLDGWDANKEKDNSGVLFEKDGNYYLGIMHPKHKNIFNYIKGINDIESEKRSLSKDELFNKIVDGESEHYQKIVYKLLPGVNKMLPKVFFSGRRIDFFAPSTEVLKIRNSASHSKNGSPQKGFEKEDFNLKDCHTIIDFFKKSIEKHPEWKEFEFEFSPTSSYEDLSGFYREVEHQGYKMDFHPIKKSYIDQCIEDGKLFLFQIYNKDFSPYSKGKPNLHTLYWKALFDTENLKDVVAKLNGQAEIFYRKHSIKKDERTIHRANKSLQNKNENNPKKTSLFEYDIIKDRRYTVDKFQFHVPITLNFKMEKMTQFAHNEKVNQMIVKSENTHVIGIDRGERHLLYYSVINPKGHIVEQGTLNTISTDKGYEVDYQQKLDSKEKARDTARKSWTTVENIKELKAGYLSHVIHKIAFLIEKYNAIVCLEDLNFGFKRGRFKVEKQVYQKFEKALIDKLNYLVFKDAKPNEPGHVLNAFQLTAPFDSFKKLGKQTGLLYYVQASYTSKIDPVSGFINFLYPKYESLLKSKIFFESMDGIRYNADKDYFEFSFDYRKMTPNRNLEGYQTKWTACTFGEKRFKNIRNAHGNWESVEVNVTEALKKILKNEDVDFKSGHDLRFEISKVKSTKFYKKLFKLLQITLSLRHSKTGTDEDFILSPIVDENGKFFDRRNATKDQPMDTDGNGA

SEQ ID NO: 6410 - protein, 1124 aa, unidentified
  source 1..1124: note = MG29-87 effector
KYEHLFNRNRESRLFEWLDIRFENDHLTENEYDEIKDVLDKFDKFTTYFTGYKENRANLFVADEKATAIAYRVVNENMPRFFENCIRMENIKKRHLDLYKLLDSFEGYFVPQAYANIICQPAITDYNKIIGRPTQNPDEKGVNSIINEYRQKNQIKNRELPMMAQLYKQLLSDRITVFLDPVINNDEEMQSIVAETIEIARGLFSEVINLTAIHALADNSENIYINSSALANLSHRVYDDWNLIYRACEAKMIKLEGKQKKGLENKLKMAIPMSELQNIIEEYIATLDEELKLSYYKIPILCNYFQNPPLDDFESATLKFEQIVKTTTPRTDLIHAIKEVLDKAMEVVRFFKPLYLFKGRSPLEVPDRNEDFYNEFERLYAELNLISKIYDRVRNYATKKQFSQDKIKLNFNNPTLLDGWDLNKEQDNLCVILIRDGNYYLALMNRDYRRLFDLKNDEVRNKALGKAGDHCYSKLEYKQVTGANKMLPKVLFAATNSDLFKPSQEILDIRKTGSHKKEAGNIEALHKWIDFCKQSIATHPEWNDHFDFKFRSTSEYSELTEFYNDFDRQAYKIKFVDIKVEYIDQLVKEGKLYLFQIYKKDFSPYSKGRPNLHTTYWRMLFGNENLANITMDTDRPIFKLNGEAEIFFRKASLEKQITHAKGQPITNKSKKDNGKESESIFEYDLIKDKRYTEDKLFFHCPITINFRAPGTTVGSFNRKVNYFVERNPEVKIIGIDRGERHLLYYTVIDQKGNILEQGSLNQIHNSYTSAGRVVEHNINYRDLLHEKEKGREEARKNWETIENIKELKAGYLSQIVNLLSNLMIKYNAVLVLEDLNAGFKRSRIKVEKQVYQKFEKAMIDKLNYLVFKELPPGSSGHYLNGYQLTAPFTSFRDLGRQSGFLYYVYPSYTSHICPKTGFVNLLNTRYESIEKAISFFEKFNSIKYNPGSDYFEFDFDYASFGKDVARSQWCVCTAGEKRYYYANHDKTSRECNATQQIKELLDKYNIEYIRGKDLLPEIIKKNDKGFFNGLMFLLGVVLQMRYTVSGTSNDDDFILSPVMDEQGQFFDSRSAATSEPQNADANGAYHIALKGLKIISSISDGKLKTVNKNERQDWFAYVQNKMYR

SEQ ID NO: 6411 - protein, 1293 aa, unidentified
  source 1..1293: note = MG29-88 effector
MKEDIKTKIDIWDDMINQYSLSKTLRFELKPIGRTLENIQYIIEEDKQRDKDFQEVKKIMDKYYSHFISRVLNNKIKISRDSLDEYKEIYFNLKKKIHDNDLKKQLELVQKKITKNISLMIKSDEDFKNIFGKEFVKEILKKYLEEKGNQSELELVSKFNDWTTYFTGFYDNRKNVFSDKDIPTSIIYRIVQDNLPKYLDNLYNLEQLDKYDIDFSYLNENFGGSIGNKDLKEYFGIENFNEFLSQDGIDKYNYLIGGYSKDMKDKVKGINNIIQEYSQQNKEDSDIKKLKFTSLYKQILSDKDEKISFRFFNFNSVDEMLKCIDIFYNKLNDENIFENLNFLFDDLNSEIYDKNKVFIKKNKLTFLSNELFGNYSVINYLLKEYVMKNYKDYNTEAKFEKWFKGKELLPLSLIEISIARVFDFFDSNSSEIKRFQNIVGVNFINPISFYLTQFKTEGFNLFEEIKSNYEAYRNLLSSNILDKQNLSQEEKEIKSKQVEILKSFLDSILKLNSFVDIFSTYNVKKDIVEKDNDFYNNYEELLLCISEVISIYNQVRNYITKKKTDIKKFKLNFEKSTLLDGWDVNKESANLSVVLRRNGKYFLGIMNKKDNKIFDKILPEFITSNNESFEKMEYKLLPGPNKMLPKVFFSEKNIKYFNPSQEIIDIRNYSSHSKNGEPQKGYSKKDFNLDDCHKMIDFYKESIEKHDEWKSFKFNFKPTQEYIDLSEFYSDVSSQGYKLDFLGISNKYVEKLVEDGKLYLFQIYNKDFSNYSKGKKNLHTIYWEELFSEENLKDVVYKLNGQAEIFFREKAFDAHITHPRNQDIENKDPIKNKLYSKFQYDLIKDKRYTYDKFLFHCPITINFKAPANALRFNDRINEIIKNNSEDVKILSIDRGERHLAYYTLLNSKGEIEKQESFNLVQDKFGRNSDYHNKLNKIEGDRDKARKNWNTIENIKELKEGFLSQIIHKIAKIVVEENAIVVFEDLNFGFKRGRFKIEKQIYQKFEKMLIDKLNYLMFKDRDKSSFGGCLKAYQLTSKFDTFQKLGKQTGVIFYVNASYTSKICPVTGFTNHIYPKYETLDKSRDLFKKFKSIKYNADKDYFEFEYMVSDFNKTLKLIKNEWKLCTFGERLITIKDKKTGYFKTESIDLTQRLKDLFESYDIDYENDFDLRDLIIKQTESDFFKSLIFYLKTLMSLRNSYTESEVKDFMRKEGDSFNLNNYDYILSPVEKDGVFFDSRNVDNLLPKDADANGAYNIGLKGLMIIDKIKNSPEVKSLNLKIEKQDYLNFVIGRNM

SEQ ID NO: 6412 - protein, 1339 aa, unidentified
  source 1..1339: note = MG29-89 effector
MKSTLDQFSHLYPMSKTLRFELIPQGATTANIESRGFLKKDEERAESYKKMKETIDRFHQDFIEKAMAHVRLSNLEDFENLYNAPNEEKKEDKYKKQLEKVQERLRKEIAKGFKSGEVKAIFLKIDKKDLVTKLLEKWIEENNLEDVHFDPEFKKFTTYFSGFHQNRKNMYTDKAQSTAIAYRLVHENLPKFIDNINIFKKVSEIPELKQNLEKLYKEIEEYLGIVSIEEAFELGYFNEVLSQKGIDVYNLILGGRSEKENKKKIQGLNEHINLYNQKQDKKNKIPKLKVLYKQILSDRTSTSFLPDAFEDDDNSTASQKVLAAIHQFYHTQLLDYQPSDKAETINVLKSFQGLLADINNFDLDKVYLRNDKSISTIAQKMAGNYGVLRDALNYYYENKIDPEFQIKYDKATTDKKRENLDKEKSKFTRQSYISISTLQTALDTYVESFDETHDVKQVYSPTCIADYFKDHFKAEPKEGSDKEFDFVSNIEAKLSTIKGLLNTPYPENERLQQDKKKIDAIKLFLDSIMEYLHFIKPLALPEDFTLEKDEHFYTLFEEWYEQMQLLIPLYNKVRNYATQKPYSTEKFKLNFENSSFLSGWAPDYNTKGGLIIKKQDNFYLCIVEKKLKKEDVEFLKTSPEDHLAHRVIYDFQKPDNKNVPRIFIRSKGTSFAPAVQKYDLPVESIIHIYDEGLYKTDFKKENPAVFKKSLVQLIDYFKLGFSRHDSYKHYDFEWKESEEYENIADFYQDVINSSYELRDEAINFDHLHQLIDQGKLYLFQIYNKDFSKHSKGKPNLHTMYWKALFEKQNLKDVVYKLNGEAEMFYRKKSIQDKNRVVHKKNIKVARKFYKDDKKTERVPDETVLRLNKFYKGQIQESGLKKEDLKFKDNYSLFHEQGKDIDLIKDKRYTVDKFQFHVPITLNFKAKGNDYINNEVLDYLKDNPDVNIIGLDRGERHLIYLTLIDQEGNIIEQETLNSIVNKKHAITTNYHQLLDDKERERDKARKNWGTVETIKELKEGYISQVVHKIAKMMVEHNAIVVMEDLNMGFKRGRFKVEKQVYQKLEKMLIDKLNYLVLKDKKPDEPAGIYNALQLTNKFESFQKIGKQSGFLFYVPAWNTSKIDPTTGFVNLFHVKYESVNKAKTFFSHFKSIRYNKNQGYFEFDFDYNDFTTRAEGTRSEWTVCTYGERIKTFRNPDKVNQWDNQEINLTEAFEDFFGKHEIVYGDGTDFKDQISVKDNKDFFAELIHLFRLTLQMRNSITNSEVDYLISPVKNSSGTFYDSRKADASLPKDADANGAYHIAKKGLQWVNQIQEFDGDDWKKLKLNKTNKGWLKFVQCNT

SEQ ID NO: 6413 - protein, 1073 aa, unidentified
  source 1..1073: note = MG29-90 effector
MSKTLRFELKPIDDTKKHLEGFVISDQERAKDYKELKKIIDEYHKYYIEKSLSKNNILSLYDLRNLADCIKKLRSLQQLKKKQENEESIEKQQESLRKKIVQAFQLDTKEKRNRLFGKELIEEVLPEWLNSSSLKDIEHKKEIVKKFSKWTTYLTGFNENRKNMYSYKEQSTAISHRIINENLPQFLLNLNTYEKIEKNFPELETQLESLKEQLKEEFEYFNVRSIKDLFKIGFFNKCLTQKGIDNYNVIIGGKVLEGDQKIQGINEKINLFRQAQSNKNDRETIRKISNKNLPLMQTLYKQILSERESHSFYFEEFKSRNEVLESINQYWESIFKKEGDKSILQKTENLFMNLKKYELDQIYFKNGDLPHVSNKIFEDYSVIKSALCFQAEKKFSTKKEREQYIKQDFFNFQEIQTALSGYLKENEEIQASEQFSGSEEIKKVLSADSNKGQNNILAVYFNLEFSEKQYNNKSLLGFMEELNRHFKEISLSKTQNEFDEKETQIIQNFLKPFIPIQFKKSCSYNGRETPKKQDQYNMGRGGVGLVDLLQIIKPVYLKKDRKKIMDLEKDASFYNEFEELYNKLSQVFPLYNKVRNYITTNKNQTKKIKINFEDSTLLDGWYVNKETDNLSVILRKKDKVIGWKDYLGVMNTHGMREANKIFDYHIKSGKSDKKQKEKNRLKQKVLHKEDNENFYEKMNYKQISNAAKDIQNLIKIDGRVCRKTKNLEDIKKKYLPSEIWKIKQNESYKGADKSGEDLKKFINYYKDIAVHYWKQFNLSFKDSGEYRDFKDFTDDINSQGYKVWFDKIKSSYIEDKVKAGEFLLFEIYSKDFSADSKGRPNLHTSYFKLLFEECNLKDIVYKLNGQAEIFYRKASKQKKISHRANVSIENKNPDNLKKTSKFKYDLIKDRRFTEDKYFFHVPIDLNFKARSTSPFNFNQDVLQFLKNKKDINIIGIDRGERHLAYWTVINQKGTILEQGSFNKITTNYKGQNQKNGKMTTNYHALLEGREKERDENRKAWTKIENIKELKAGYLSHLVHQIAHLMIKHNAIVIFEDLNRGFKRGRMKFEKQVY

SEQ ID NO: 6414 - protein, 914 aa, unidentified
  source 1..914: note = MG29-91 effector
KVFSIADIETALDKEIDGANFAAANIKAEYYKKTDDIFLNYFSNRSKEILKNLLASWKNLEEYGVLELKELDEKRGKEGEKGYEQIARLKTFLDNANEFLNFIKDWNVKTDKLPNNAIHDWYEKLNDFINQFHIITLYNKVRNHVTKKPYSLDKVKINFENSTLLAGWDRNKESNNCGILLEKSGLYYLGIMTSLSNKLFDYEFSEKDTTKIRAQKLVLAEKVLDKNGTNSYRKVNYKLLPGPNKMLPKVFFAKSNSKLFNPSAKITKIKVNKLYSKENIEKYGIQNLHDYIDFCKDALCRHPEWSKAYGFTPASFRKTTQYKSINQFYKDVETMGYSISFANVREAYINEKVENGELYLFQIYNKDFSQERKKERANRKENLHTYYWKALFDERNLKNIVFKLNGQAEIFFRKASIKLSDEKKCKGDHCEKLKDKFNYPIIKNRRFTENKFLFHCPIGMNFKAPSIPGRFNTKINTFLQNNPNINVIGIDRGEKHLLYYSVVNQDGDTIKQGSLNTIANGFIPKGETVERCIDYHAKLDEKEKKRDLARKSWGVIENIKELKSGYLSQVVHKLAKLIIKYNAIVVLEELNQGLRRGRFKVEKQVYQKFEKALIEKLNYLVFKSEKNPLEAGHYLNAYQLTNKFESFEKVGCQSGILFYTVATYTSGTDPVTGFLKNVYVKYESIEKSVKFWNSFDSIIYNVEKDRFEFTYTLGEISSTKANTGKNESKIVKNQWTVCSSVERSRYIKPELTEEQKQILDYKGIGKLGTHELFKVTDKLKALFDGEINYRENPKLKSRLCTIKDAAFHRKCLYYFNAIMNMRVTDSGANKGTNENDFILSPVEPFFDSRCGCKKLPENGDANGAYNIARKGICILKKLNAVPDISRPEILIDKKIWQDYAQSCETLKQQLEKMK

SEQ ID NO: 6415 - protein, 791 aa, unidentified
  source 1..791: note = MG29-92 effector
MNTSLQPNEKLVQQKDKTLLIKNYLDSIVNLLHFIKSLKPREELSQKDEAFYGRFDELYEALNVITPLYNKVRNHLTKKPYSTEKYKLNFENSTLADGWDLNKEADNTTILLRKEGNYYVAVMDKKHNKIFRDIPASAKGEAVYEKMVYKLLPGANKMLPKVFFSKSRIEEFNPSTELLENYKNETHKKGESFNIQHCYNLINFFKSSICQHEDWKHFNFNFSETGTYEDLSGFYREVEHQGYKITFVNISESYIHKLVEEGKLYLFQLYNKDFSKYSKGKPNLHTLYWKMLFDETNLKDVVYKLNGEAEVFYRKKSIEDKNKIIHKANQPISNKNPENVKKQSSFQYDITKDHRFTKDKFQFHVPITMNFKAKGILNVNNEANKYLRNNPDTHIIGIDRGERHLLYLTLINQQGEIIKQESLNIVANEKQKTDYHKLLEAKEGKRDEARRDWGTIENIKELKEGYLSQVVHKIAEMIVDYNAIVVMEDLNFGFKRGRQKVEKQVYQKFEKMLIDKLNYLVFKTPKPNQPGLLNALQLANKFESFKKLGKQSGFIFYVPAWNTSKMDPVTGFVDFLKPKYESVDKAIAFIKQFDAIQYNKAKQYFEFVFDYSNFTEKAEGSKTKWTVCTTNTERYVWNKTLNNGKGGQEHNNVTEKLEVLFGNAGITYGNGENIISKITEQTGAEFYKALLKLLSITVSLRHNNGEEGEKEQDYILSPVAPFFDSRKATDTLPKNADANGAYHIAKKGLWVLEQINKCEDFKKLKLAISNKEWLEFVQKSSIKTNYPQPFA

SEQ ID NO: 6416 - protein, 1255 aa, unidentified
  source 1..1255: note = MG29-93 effector
MNTTVFTNQYPLSKTLKFELIPQGKTLENIQHEGLLEQDNNRAVSYQKIKRLIDEYHKVFIENSLKGMKLVELEVYSEWYQKKDKVDADKKAFEKVKEALRKQISLTFSSQDIYKTLFSKELIKEDLLAFVKQEDKSLVNEFKDFTTYFTGFHENRKNMYVADEKSTAIAYRLINENLPKFIDNLNIFLQIEDKSVSLIADFNKALQEMEEIAQGRTLEDIFTLSFFNETVTQHGIELYNIIIGGRTGENGKSKIKGINEYINLYNQQQNNKLNRLPKFKQLYKQILSDRNSVSFVLDNFENDNHLLECIEQFYQSGICHFESDGNSIDLLTTIRQFLNGLDSFDQTKIYIRNDNSITDISQKIFGDWNVIRAALTAFYEKTNPIKPRERLDKFEERKESWVSKTGYFDINTIQTALDSYDSEAIIDKYSPDCIVKHLGNIGKSKESTIDLVDTIQQNYAVIKDLLNNPYPEDEKLGTAKELVAQIKTFLDSLLNLIHFLKPLNVGNDELEKDESFYSIFTPLYEQLSEVIPLYNKVRNYLTQKPYSINKVKLNFENSTLLNGWDVNKEVDNSGILFRKNGLYYLGIMDKNNNKIFDRNVPQCQDLTTSFEKINYKLLPGANKMLPKVFLSKKGVETYNPTLEIIENYNNETHKKGDTFNIDDMRKLIDYFKESISLHPDWKHFEHKFSETKSYEDLSGFYREVEKQGYKISFKNIDEAYINKLVEEGKLYLFQIYNKDFSPFSKGTPNMHTLYWKMLFDISNLKNVVYKLNGEAEVFYRKSSIKEKNMIVHKANEPLQSKNELNTKKESSFTYDIIKDKRFTLDKFQFHVPITMNFKATGTDNINPSVNQFLQNNKDVNIIGLDRGERHLIYYTLVNQKGEILEQGSLNEISNEKQKVNYKDLLVKKEGDRTQARKDWNTIENIKEIKEGYLSQVVHKIATLMVERNAIVVMEDLNMGFMRGRQKVERQVYQKLEKMMIDKLNYLVFKTKATDEPGGVLKALQLTSKFESFKSMGKQSGFLFYVPAWNTSKIDPTTGFVDFLKPKYESIDKAKSFFSSFKAIRFNASSNYFEFEFDYNDFNGKAEDTQTNWTVCTVGTERYSWNKKLNMGKGAIEKIDITQALQLLLDEANILYAAGNNLIQDINDQNNADFFKKLIKLLSVTLSLSHSNGLSGEAEKDFILSPVKNDQGQFFNSNDFDGRLPKDADANGAFHIALKGLWVLRQINEAEDMKKVKLSITNKEWLQFVQNKHYKS

SEQ ID NO: 6417 - protein, 1273 aa, unidentified
  source 1..1273: note = MG29-94 effector
MNENNSIWDNFINKYNLSKTIRFELKPVGKTIDFIKENGLIEEDKQREKDFNEVKKIMDEYYVEFIENCLKNIKLDLSDLQEYYTIYFELKKDKYNSDLKKQFKNIQKKIANNMYQQIKDVDNFNNIFDEKFVNVVLPKWLKEKGREQDEMLLSKFKKWTTYFDGFFNNRQNVLSNDLIPTSIFYRIVVDNLPIFLDNIAKYDKLKKINGFPLESIEKNFAKYLNNVSLDYFFSLENFNNLLNQEGIDLFNLILGGYVENNSKICGLNESINLYSQKPENKETSKQLKQLIMMPLYKQILTEKKSFSEKFGIIQDNQELVNLIDDIYTNNYVLNFDNLQKLIKNLNEYDLNQIYVNTLSLQKISKSIFKDLFVIRNGLKEFIKNKEHIKSDKKSEKKLEEILNQKYFSIFEIQEGVKLLKLSKEGNSFSDNFMIDYFLENINDKLFETITNNYNQFNSITVNLLNKIRLEDIPTIKDLLDSLKKLFDNIKPLYVNLNMGTNTKIQEAYNLDSLFYIEFNKIYIAFSVIIPTYNKVRNYVTKKQKNVKKFKLNFNCPVLLKGWDVTKEPENHSVLFRKDGDYYLGIMPKGHTHMFSNIENIDNDGEYYEKMVYKQISDASKDIQNLFVKDNKTQRIVGRKEKEGDNKGKNVELENARKKYLPEDIQEIKKKKSYLRSSPSFNEADKNRFIDYYKERVIDYENYNMFNFKFKESEEYLDFNDFIKDVDNQGYKIEFIKINEQFIMDSVNTGKLYLFQIYNKDFSKNKCESNKNSKPNLHTIYWEELFSEENLKDVIYKLNGEGEIFYRECSKAIPKEVTHPKNIPITNKNPINNKQTSIFPYDLIKDKRYTEDKFLFHCPITINFKQNNMLKGFNQQIISYLKENNVTILSIDRGERHLLYYTLLDLQGNIIKSGSLNLVSDDVKRQWNYHDLLDQREKERDKARKDWMPIEAIKNLKEGYLSKIIHDISKMVIENNSIIILEDLNFGFKNGRFKIEKQVYQKFEKMLIDKLNYLVFKDKPKTEVGGSLKGYQLTDKFVTFNRLKKQSGILFYVDAKYTSAIDPTTGFFDMIYPSYTSVDNSIALFKKFNYIKYNTKEDLFEFNFNFSKFNTELKLYKDNWSIWSNGVKLVNYRNPNKNNEWETKEVIVNNQLKKLFGDYKINYDNDEDLIPQIISNTTADFHKQLIENLKLVLKLRNSRINSDDDYILSCVKNKDGVFFDSRESSNNLPKNGDENGAYNIGIKGIILLNKIRENKEIKKITKEEYINYLIKRGK

SEQ ID NO: 6418 - protein, 1309 aa, unidentified
  source 1..1309: note = MG29-95 effector
MKLNKFTHQYPISKTLRFELKPVGETADYIEDFKSQYLKDIVIQDQQRAEDYESIKVIIDEYHRHYIEEKLSEPFDKKTGELFISGDEFENAFSYYQRFRENSKDEKARKEWIEVQNSLRKSLVKVFSDRKKRLFQKELITKELPSWLKEKGEWEDKKNVVENFNRFTTYFTGFNENRENMYSHEEQSTAISFRLMNENLPKYFNNCIQYHKAIESYDGLSFTVNPDLLNEMGVSILSEIFQPSYYIQLFTQSGIDKFTELLGGFTKENGEKVQGLNETINLFRQQKAIKAKAFPNFISLYKQILSDRETSSFIPDQFENDNDLLKSLGKFIKEMVKEDGLFKKLEDSIKLITDADLHRTFIKNGVEITKISQSIFGNYSILKSAIYHHAESVLYPDPISGKISEALKEKRIKYVNKQVVFSIAELETILSNYASQMTDDNPDKEIIAQCENSEHPIRTYFLNAIENVKNDKDIEFGKAIENVLPLISLENLNKGKDGQAQTHKIQKMLDAFLAVTHAVKPLHLVKGRKPIDIPDMDMGFYAEFSKAFENFEQLVITLYNKTRNHLTKKTFSTDKIKINFENPTLLDGWDANKEKDNSGVLFEKDGNYYLGIMHPKHKNIFNYIKGINDIESEKRSLSKDELFNKIVDGESEHYQKIVYKLLPGVNKMLPKVFFSGRRIDFFAPSTEVLKIRNSASHSKNGSPQKGFEKEDFNLKDCHTIIDFFKKSIEKHPEWKEFEFEFSPTSSYEDLSGFYREVEHQGYKMDFHPIKKSYIDQCIEEGKLFLFQIYNKDFSPYSKGKPNLHTLYWKALFDTENLKDVVAKLNGQAEIFYRKHSIKKDERTIHRANKSLQNKNENNSKKTSLFEYDIIKDRRYTVDKFQFHVPITLNFKMEKMTQFAHNEKVNQMIVKSENTHVIGIDRGERHLLYYSVINPKGHIVEQGTLNTISTDKGYEVDYQQKLDSKEKARDTARKSWTTVENIKELKAGYLSHVIHKIAFLIEKYNAIVCLEDLNFGFKRGRFKVEKQVYQKFEKALIDKLNYLVFKDAKPNEPGHVLNAFQLTAPFDSFKKLGKQTGLLYYVQASYTSKIDPVSGFINFLYPKYESLLKSKIFFESMDGIRYNADKDYFEFSFDYRKMTPNRNLEGYQTKWTACTFGEKRFKNIRNAHGNWESVEVNVTEALKKILKNEDVDFKSGHDLRFEISKVKSTKFYKKLFKLLQITLSLRHSKTGTDEDFILSPIVDENGKFFDSRNATKDQPMDADGNGAYHIALKGLWNLEQIRNWDGESRLNLAMKNVDWFSFAYQKPFKK

SEQ ID NO: 6419 - protein, 1232 aa, unidentified
  source 1..1232: note = MG29-96 effector
MLQNFTNQYQLSKTLRFELRPVGKTKEHIEAKGLIIQDEQRAEEYKEMKKIIDRYHKAFIEDALNGIAIEGLETYEKLYFAIKDEKGKKEFEKLQDTLRKRIVELFKKHPKWSTLFKKELIRNELLTFLDSEEIPEEQKINEKEIVLKFMDFTTYFTGFHENRANMYIDEALHTAVAYRIVHENLPVFLGNKKTFEQIATKYPELIADSKDAIESHLFGAVFEDMFTLAYFSHTLAQNHIDLYNTMIGGKVSNDGSKIQGFNEKINLYRQKHGLSKRDLPNLKPLYKQILSDRESLSWLPEAFEDKNELAEAIKTFYQNNIIAFECCDGKVNLLEKFPEIFKENQYYDLSKIFIKNDKSLTDIAQAIFGKYGVIKEALWEKHLRDNPKAAKSKDISADEERFFNKKDTYFSINDIHIALKAGEDRVQTGLDFSINDIHIALKEAQSPSDILTYFSNEIKPLTKAVQVAYKTWLDDQEKTERIKEVMDALLAWQRFLKPLSVKSDVDRDIAFYATFESYFESLSAVVKLYDKVRNFMTKKPYSLEKFKLNFENSTLLDGWDVNKETDNTAILLEKNGLFYLGIMDKKHNRVFKNTPESQDDSSYRKINYKLLPGANKMLPKVFFSNSRIDEFAPSSDIISNYKKGTHKKGEIFDLEHCHKLIDFFKSSIQKHEDWKNFEFKFSDTASYKDLSGFYREVEQQGYKITYKNISQSYIDTLVSEGKLYLFQIYNKDFSPYSKGTPNMHTLYWRALFDEKNLADVVYKLNGQAEVFYRKKSIIYSDEVMQKGHHAKELVGKFDYPIIKDRRFAFDKFQFHVPITLNFKAQGYTNLNAIVNEMIASGKEDIKIIGIDRGERHLLYLSLIDAQGKIVEQYTLNQIINSYNGKDHVINYHEKLAKKEDERAKARVNWGTVENIKELKEGYMSHVIHRIATLMVEHRAIVVLEDLNFGFKRGRFKVEKQVYQKFEKMLIDKLNYLVDKKKSPNELGGVLNALQLTNKFESFEKMGKQNGFLFYVPAWNTSKIDPVTGFVNLFDTRYASVEKSKEFFGKFKSIRYNSEKDYYEFEIDNYTQFNPKAEGTRQNWTICTYGDRVLTYRNSEKLNQWDNKTVQLTDGFKTLLNGQADNLKEYIVAQNDKAFFEKLLGLFRLTLQMRNSITGTDIDYLVSPVVDENGVFYDSRVCDDTLPKDADANGAYNIARKGLMVVKKIKEAQDIKKPDLKITNKEWLQFAQR

SEQ ID NO: 6420 - protein, 1012 aa, unidentified
  source 1..1012: note = MG29-97 effector
MDLKNNNLSEFSNQYQLSKTLRFELKPQGKTIEHIKKKGLISKDEARAKSYEKMKKTIDGFHKYFIEVAMAQVNLSFLDEFEQLYNAPTEEKKDDTYKKAFEKVQNNLRKEIVRGFKVGEAKDIFSKIDKKELITKLLEEWISKQQNDDIYFDEKFKTFTTYFGGFHENRKNMYTDKAHTTAIAYRLIHENLPKFIDNIKIFEKVKTVPEVYKNCSTLYTNIEAYLNINSIDEAFELAYYNEVLSQKEIDVYNLIIGGQTKEEGKKKIQGLNEYINLYNQKQEKKNRIPKLKPLYKQILSDRENISFLPELFEESQDVLDAIESYYKANLVDYKPDDKDDTENILKELYSLLKGVNSFDTNKIYIRNDKSLTDISKAIFGDWAIIDAALEFEYIQDITIPKSGLTKKQEKEKERYLKQPYFTIQEIEQALKAYRNENEVLADFTEGMVGNYFYSHFKTKTDSDKEFDFVSNIEAKYSCIKGVLNTKYPKNQKLNQDKVTVNNIKVFLDSLMELLHFIKPLALPNDVPFDKDETFYGHFETYYEQLQLLIPLYNKVRNYATQKAYSKEKFKLNFENSTLLDGWDVNKEEANSCVLFQKEGLYYLGIMDKNHNKVFRNLPSTSSKNTYNKINYKLLPGASKMLPKVFFSSKNIAYYNPDKEILRIRNHSTHTKGGSPQKGYEKQDFNVKDCRKMIDFFKTSIHKHPDWKKFGFEFSETAHYNSIDTFYREVESQGYTITHTAIDNDYIDKLVNEGKLYLFQIYNKDFSPYSKGKPNMHTLYWKALFEPDNLNDVVYKLNGQAEVFYRKKSIKEKHKVIHKAQEPIINKNPLAQKKTSVFDYDIIKDKRYTVDKFQFHVPITLNFKAVGNEYLNTNVLDYLRDNSDVKIIGLDRGERHLIYLSVIDQEGNILEQESLNTIINKEHNIHTPYHNLLDKREKERDSSRKEWGTIATIKELKEGYISQVVHRITQLMVKHNAIVVMEDLNFGFKRGRFKVEKQVYQKLEKMLIDKLNY

SEQ ID NO: 6421 - protein, 1205 aa, unidentified
  source 1..1205: note = MG29-98 effector
MLKQFTNKYQLSKTLRFELIPVGKTKDILDKKGLVLEDEKRSEEYKIVKTLIDDYHRYFIQEALSRKNLLDLEKFENLFLKKDKNKDEEEDFNKIKTDLRKQIVSFFESNELFKNIDKKELIKVDLLNFLTDENDKNIVKKFSDFTTYFTGFHENRKNIYSADEKHSSIAYRVIHENLPIFISNKVAFLNILKEYPEIIKNTQKNLENHLLGAMVEDMFNLENFSLTLTQIYIDIYNTILGGKTLEDGTKIQGLNELINLYRQKNSIEKRKLPNLKPLHKQILSDKETMSWILEAFTKHEEIETAIEKLYHDNIVDFYCCDKRINILDEFENLFSKNDDYDLTKIFIKNDLSITSISQDIFKDYKIIKDALWQKYLNDNPKIAKSKDLSADEEKYFSRKNSYFSFFNILEALKFVEIKLDFDLFEYFKNIVKEKSDLIKVSYFEWEKDKNNKKSTKDLLDNILNLQRAIKPIYVKSELDKDIVFYAMFDTYFESLNKIVKLYDMVRNFESKKPYSIEKFKLNFENSTLLNGWDLNKETDNTSLLFEKDGLYYLGIMNKKHNKSFLNKKESEENNCYKKIEYKLLPGANKMLPKVFFSNKNIDFYSPSDNLLENYKNGIHKKGTTFDLNFCHELIDFFKSSINKHPDWKNFNFQFSNTLEYNDISDFYREVEQQGYKISFKNIEIKFINNLINEEKLYLFQIYNKDFSPYSKGTPNLHTLYWKMVFDKENLKNVVYKLNGQAEIFYRKKSIEYSDDKLNKGHHNEDLKDKFNYPIIKDRRFTIDKFQFHVPITINFKALGKNNINNDVNEFIKQNHKDIKIIGIDRGERHLLYLSLIDNNGKIIEQYSLNEIVNNYNNQEFKVDYQDLLDKKEKDRAFARENWGIIENIKELKEGYISQVIHKIAKLIVEHNAIVVLEDLNFGFKRGRFKVEKQVYQKFEKMLIDKLNYLVDKKITNDEIGGVLNALQLTSKFESFERLGKQSGFLFYVPAWNTSNIDPATGFVNFFDTKYQSVEKAKEFFSKFDYIKYNIKKDYFEFAFDYNNFTQKAKDTKTKWVLCTYGTRIKTFRNKEKNNQWDNIEVDLTTEFKKLLQATENKDLKEFITSQNTKDFFEQLLYLFRLTLQMRNSITNSKIDYIVSPVADKNDIFYDSRNLSIALPKDADANGAYNIARKGLMIVEKIKKSDNNKIDMKITNKEWLQFVQGK

SEQ ID NO: 6422 - protein, 1189 aa, unidentified
  source 1..1189: note = MG29-99 effector
LRNHIANCFKDEKELTIVGKDFIKKILPQWLEDSGSLEYKKLIDEFKDRVTYFTGFDNTRKNIYTNQAIATSVAYRVVHDNLPIFIDNLQRFKKLQDYREQIDLVQIERDLKVNINEMMQLDYFNQCLTQTGIDLYHQLLGGIEAKEGVEKVQGLNERVNLAQQQLNKNSIDANSKQTKIKLPQLVTLQKQILSEKRSGAFANPIDNDRELCSLLDKVVYKNDRLLVSIDKTNTDTGEIKQQQVDVNQLMTNTIDALNHADLEQVYIHSDMLNMLSQRKLGVWSFLKEEVWQPYIDSQYSKKTEREKVQKMPLISIADLHNSINYFLKQNEGHDAFNNENQQHTALAKLYHWYNDSGEKPLVTYLSNQWQLLNIGQGKEVKSLSQLHQALTPILQKYGTSLEEKLKSNKEAVRQIKEYLDALTDLQHLVKTYQFKVTKKDAKNVAIKALLQDSHFYNHYQQLLDAVSMIVPIYNRVRNYLTKKPYSIEKYKLNFENGTLADGWDVNKESANFTVILRKKNDRNKYDYFLAIMPTGKGLNRAFEAGNLATTKNKDGYEKLFYKYLPGPNKSLPKSFLSQKGRTNYKPSEELLENYKNKTHTKGDAFNLQHCRDLIDYFKKCIQKHPDWGVFNFTFSNTDSYEDISHFYREIEQQGYKVWFENIAQQYIDNLVSAGKLYLFQLYNKDFSPYSTGKPNLHTLYWLSLFSSQNIADPIYKLNGEAELFYRPKSIEKRNVTIHRKNQPIKHKIGVPQNSQFGHDIIKDKRFTENYYQFHVPITINRASVTDKNLNDAINQYSCDSPNLTILGIDRGERHLAYFTLIDQNKKILEQGSFNKPNGGQDYQKLLDKKEKGRGEARKSWSTIENIKELKAGYLSQVIHKICQMVIEHNAIVILEDLNFGFKRGRFKIEKQVYQKLEKMLIDKLNHLVFKDKAVDEAGGLRNGYQLTAPFTTFEKLGKQTGILYYVPAYHTSKVCPKTGFVDLLYPKYENLTKAKDFFSKFDFIRWNQQNNYFEIGLDYNKFKAKKDITGLRTKWTICTYGDRIHQTKGKVSQQWESRDINLNKQWQTKLEESNIAYTHGNCIVSDIVAKDSIEFWRSLFWVLKMTLQMRNSKPNSTDAKDDYLLSPIAYQPNQFFDSRKASDNEPKDSDANGAYHIALKGLMMLEQRKQQVKKLDFSNKAWYQYIQNQ

SEQ ID NO: 6423 - protein, 1034 aa, unidentified
  source 1..1034: note = MG29-100 effector
MDLKNNNLSEFSNQYQLSKTLRFELKPQGKTIEHIKKKGLISKDEARAKSYEKMKKTIDGFHKYFIEVAMAQVNLSFLDEFEQLYNAPTEEKKDDTYKKAFEKVQNNLRKEIVRGFKVGEAKDIFSKIDKKELITKLLEEWISKQQNDDIYFDEKFKTFTTYFGGFHENRKNMYTDKAHTTAIAYRLIHENLPKFIDNIKIFEKVKTVPEVYKNCSTLYTNIEAYLNINSIDEAFELAYYNEVLSQKEIDVYNLIIGGQTKEEGKKKIQGLNEYINLYNQKQEKKNRIPKLKPLYKQILSDRENISFLPELFEESQDVLDAIESYYKANLVDYKPDDKDDTENILKELYSLLKGVNSFDTNKIYIRNDKSLTDISKAIFGDWAIIDAALEFEYIQDITIPKSGLTKKQEKEKERYLKQPYFTIQEIEQALKAYRNENEVLADFTEGMVGNYFYSHFKTKTDSDKEFDFVSNIEAKYSCIKGVLNTKYPKNQKLNQDKVTVNNIKVFLDSLMELLHFIKPLALPNDVPFDKDETFYGHFETYYEQLQLLIPLYNKVRNYATQKAYSKEKFKLNFENSTLLDGWDVNKEEANSCVLFQKEGLYYLGIMDKNHNKVFRNLPSTSSKNTYNKINYKLLPGASKMLPKVFFSSKNIAYYNPDKEILRIRNHSTHTKGGSPQKGYEKQDFNVKDCRKMIDFFKTSIHKHPDWKKFGFEFSETAHYNSIDTFYREVESQGYTITHTAIDNDYIDKLVNEGKLYLFQIYNKDFSPYSKGKPNMHTLYWKALFEPDNLNDVVYKLNGQAEVFYRKKSIKEKHKVIHKAQEPIINKNPLAQKKTSVFDYDIIKDKRYTVDKFQFHVPITLNFKAVGNEYLNTNVLDYLRDNSDVKIIGLDRGERHLIYLSVIDQEGNILEQESLNTIINKEHNIHTPYHKLLDKREKERDSSRKEWGTIATIKELKEGYISQVVHRITQLMVKHNAIVVMEDLNFGFKRGRFKVEKQVYQKLEKMLIDKLNYLVFKDKLPNEAGGLYNALQLTN

SEQ ID NO: 6424 - protein, 775 aa, unidentified
  source 1..775: note = MG29-101 effector
FLKPLHIEDGNKKDNKLQQALELDADFYNNFNELYSKLKEVIPLYNKVRNYITQKPFSTKKFKLNFQNSTLLLGWDENKETSNWSVLFRKDGKYYLGIMAKGNNKIFENIGSKETNKSDGFYEKVRYKLLPGPNKMLPKVFFSKRNIESFEPSEEIKSIRNHSSHTKNGKPKEGFEKKEFNLRDCRKMIDFYKRSLKKHPEWNEFDFNFKETKKYEDLSEFYRDVSNQGYKITFEKISEPYIRKLVDEGKLYLFKIWNKDFSKYSKGKPNLHTIYWKMLFDENNLKDVVFKLNGEAELFFREKSISRKITHPKNKSIKNKDPFQGKKESKFNYDIVKNRRYTEDKFLFHCPITINFKSKEQSWEINNQINKKIKKSSDDIYILGIDRGERHLAHFTLLNPKGDLVLQESFNIIYDDLKRKRNYHKKLDKLEGSRTEARKNWKKIANIKEMKQGYLSQVIYKIYNMAIDKNAVIILEDLNFGFKRGRFKIEKQIYQKFEKMLIDKLNFLVFKDMGKKNVGGPLRAYQLTRKFESFQKLGKQSGIIFYVPANYTSKICPMTGFVNLLYPKYENVRKSKNFFKNFKFIRYNPDENLFEFNFNYSDFKGKNKSEAELKRDNWSIYSFGKRLFNKKKKNSREFETQEIDPTAELKKLFMDNGIDFEDGNNLRGKICSSDDAKFFKSLTFLLKRVLQLRNSRTGGGEDYILSCVKDKHGNFFDSRKAENGQPQDADANGAYHIGLKGLMLMKRIKDSDIDRKIDMRIKRNDFINFVIDRNK

SEQ ID NO: 6425 - protein, 1244 aa, unidentified
  source 1..1244: note = MG29-102 effector
MKQKSVWNNFTNQYSLSKTLRFELKPIGDTLQNIKEKGIIEEDKEREKRFNEIKQLMDEYYKDFIERALKTVHIDQKDLKAYQEVYLTLKKSKQKKESYEKLEKKYLANQKLLRNEIYKKIKEFKEFNYLFKKEFVNKLLPEWLDEKKRFAEANKVREFGRWVTYFTGFFENRKNVFSNEPIATALIYRIVHDNFPKFLDNIERYEILKEHKVSFKEVEKNFKNELNGSLDAFFSISTFNDCLNQEGIDRFNMIIGGKSTEDGHIIKGINQVVNEFSQKHDEKKIRKLKMMPLFKQILSDRESASFIPDKFKNDKELIDSIITYYKNQDFNKLKNVLSRLHECDLNQIYIRNDGRLNRLSKELLGDWEFINNGLKEYARSELNKNTDKKLDDWFKKEFFAIAEINEGIKRINPDISLKEYFASLKREDKNIVQDIKKNYKEFKKIEVTSDSSLLSKKREKDIETIKAFLDSIMDLFHFIKPLYMNSDNAHDIDSDFYIKFNKSYEELQEIIPLYNKVRNYVTQKPFSTKKFKLNFQCSSLLGGWSSSFTTNAGLILRKDGNFFLAIVPRSLDKDTVNRLKQKGNTIDVLNYDFQKPDNKNIPRLFIRSKGENFAPAVQKYNLPINDVLKIYDKGYFRTEYREKDEKVYRESLKRLIDYFKEGFRKHESYKHYTFEWKKTEDYKDISEFYHDTEKSCYKPRFYQVNLNVLEEMVSAGKIYLFQIWNKDFSTYSKGRKNLHTLYWQELFSSENLKDVVYKLNGEAELFFREKSLEKKITHPKKKPIDKEPRKDDKGNLKEKSLFEYDLIKDRRYTEDKFFFHCPITMNFKAGNNKWIVNQRVRDAINSGVNVLSIDRGERHLAYYTLLDPKGKILEQGSFNRISDDLGRGKDYHDKLNKLEKSRDKARKNWKEIANIKELKEGYLSQIVHKITKMAIEKNAIIVLEDLNFGFKRGRFKIEKQVYQKFEKMLIDKLNYLVFKDQKKEEPGGLLKAYQLTSPLESFKKLGKQSGIIFYVPAQYTSKVCPRTGFVNLLKVKYENIEKTKNFFRRFETIYYDKNNDYFVFEFKYSDFIDEMKKKKLVRDKWTVCSYGKRLVNRQSSKHKGFETAEMDPTKELKTLFNQYELDFKDGNNLVSQICGYQDSKFFKDLIYFFRCILQLRNSRTNDSEDYLLSCVPDKKGYFFDSRNAKTAKTDEPHDADANGAYHIGIKGLMLIDRIRSGGKQDFKIDRNDYFNYIMKNGGKH

SEQ ID NO: 6426 - protein, 1312 aa, unidentified
  source 1..1312: note = MG29-103 effector
MAENRCVLDNLTNMYSLSKTLRFELKPIGKTLEYIEKKRLISEDEKRAESYKKMKKIIDGYHKHFIEIAMSQVELTKLEEFAELYNASPERKKEDDFKTKFKKVQKDLREEVVAGFKNAKEEVHSSKNDKKDTKDKEEVEKSEKSDSSKNDKKDTKGKTFFEKLFMKQLFTELLDDWVKNPEDKKLVDEFKTFTTYFRGFFENRKNLYTNKEQSTAIAYRLIHENLPKFLDNIKTFEKIKSIPELYNKCDILYGEIKEYLGITCIDDVFELDYYNNILTQKQIDVYNLIIGGRVTEKGQNKIQGLNEYINLYNQKQDKKDKIPKLKQLYKQILSDKKSASFLPEAFEESQEVLDSIRDYYQSNLIDFKPDDKEDTENVLKEIRDLLAHLKNYDFNKVYIRNDQSLTNISKKLFDDWGIIKSALEFAFLQTLKIGKKGLSKKQEKEKKNYQDQSYFSIAEIESALLAYKDETEILKYLKEDTNPVANYFHTYFKATKKDAEKEFDLIANIEAKYSCIKGILNTEYPKDKRLYQDKKLIDDIKAFLDSLMELLHFVKPLSLPSDSPLEKDELFYGQFQIWYDQLQLLIPLYNKVRNYATQKPYSTKKFKLNFENVQLLGGWDANKESDNTSVLFRKNRLYYLGIMDKKHNKIFKNIPDASPGELVYEKMVYKLLPGAKKMLPKVFFSTSRIKEFAPSEELQKKYHAGTHKKGEEFNINDCHNLIDFFKESIAKHEDWKNFEFKFSDTSSYENMAEFYREVEHQGYKITFQNISEDYINQLINEGKLYLFQIWNKDFSTHSNGKPNLHTMYWKALFDPKNLKDVVYKLNGQAEIFYRRRSISKERRIIHKANEPIENKNPNNPNKNSVFEYDIIKDKRFTVDKFKFHVPITLNFKASGKENINEEVYKYLKNNPNVNIIGIDRGERNLIYVSLINQKGEILEQFSLNDIITSYKNWENKDVEVKTQYHALLDKREGERAKARENWGTIETIKELKEGYISQVIHKIAQMMVKHNAIVVMEDLNFGFKRGRFKVEKQIYQKLEKKLIDKLNYLVFKDKTDNEIGGLYHALQLTNKFVSFQKLGKQSGFLFYVPAWNTSKIDPTTGFVNLFNTRYENLEKAKTFFETFEDIRYNTTKDYFEFEVKEYSKFNSKADDTRQDWIICTYGERIKTFRNPDKNNQWDNKEIILSEEFKKLFESHHIDYKTNLKAQIISQENKKFFEELLHLFKLTVQLRNSITKSEVDYLISPVMNSTGQFYDSRKAGKKLPKDADANGAYHIAKKGLWILQQINVHNEDRKKPNLAIKNKEWLQFVQSNR

SEQ ID NO: 6427 - protein, 979 aa, unidentified
  source 1..979: note = MG29-104 effector
MLSDVKTSSFVPDFFENDNELLTSLDEYIHYGNKRVKDLGDIIEKLSNFDSSEISVNGKHLSSLSLAMFSNYRAMSDILHAWAEENLPTVKARKNFCKKESFTLYELEAAILFYKLHMEDGDTLEESFGSLESDKPLVSFMVRFFNEKRNAIEGLIPDAKTVIDNGSISKNRRSPKKNGKGGGKGFYQMEAIRGMLDAFSEVYRSVKWLHLIKGTDLIEGANTDSDFYEIFAPLYEEFSDTTIVLYNKTRSYLTQKPYSKDKMLVNFDAPQLLSGWDINKQKESLGVILKRDEEFYLAIMRKEHNTVFLEAPVAEEGEEFYERLGYKLLPSPSKMLPKVFFSRKWLEANNVPEDILDIKRSKSYHRASKDFSLEDCHRLIDFFKANINNYKVNESDEFGWDVFSFEFSPTSSYQDIDEFYQEVEQQGYKMWFDNISKEYVDECVKNGEIYLFRIMNKDFRPASKGKPNLHTLYWLAIFDDENLENPVIKLNGGAKMYFREHSIEEDDRIIHPANEPIANKTPENPKKESKFGYDIVKDRRFTEDKFKLHVPVTINCKAANKITAELFNRNINKALALQEGMHVIGIDRGERNLLYYVIIDWKGRIIKQGSLNCLETSQGYSIDYKAKLQRIEKDRDASRKGWATIDDIKNLKSGYMSHIVYTISRMMIEYNAIVCLEDLNMGFKHSRKSVERQVYQKFEEALINKLNYLVFKERGRSESGGYAAGYQLTAPFVSFDKLGKQSGVLFYVNPSYTSKTDPLTGFVNMLRPKYINMKKAKAFLKTFDHIKFNDEAGYFEFHADFKKFVKKVNGIRTKWVICTHGDERYVNRRDSSGRFRSAKVNVTEEMKALLHEYGIDYHDEESLQKSILNVDNSKFYRYFLHLVSVVLNMRYSVTGNDDIDFILSPVANANGVFFDSRNADDDMPKDADANGAYHIAMKGLWSLQQIRNHDWDADDNKRLNLMMSNEEWVRFIQEAAMRR

SEQ ID NO: 6428 - protein, 957 aa, unidentified
  source 1..957: note = MG29-105 effector
LTQPGIDLYNKMIGGESLENGKKIQGFNEKVNLFRQANKLDGKSVPMIKQLRKQILGDKNTPEWITEGFKDKDSMNEAIVKFIKNIEHANDNLTGELFIRSKPYDYNKIFIKNRFITNISHELFKDWNLLKNNMLEQYKSKNPKSKNPEKEFAKIPYFSIAEIQESIPNQNKHFPDFIIDHFHDKIMTLIPTEKKIHELWKGNKDSIPALKNLMDYYLELYRISKPFDVDCADKDPVFYELFDEIFNDFSKVVKLYNEVRNFITKKPYSLEKIKLNFGNSTLLSGWDINKETDNTAVLLQKDGNYYLAIMNKDHNKIFKNTPVTKDEKNSYKKMEYKLLPKSYMMLPKVFFTKGNKDKYEPSEEIIRIYEEKTFKTGDNFNINDLHKLIDFYKESVKKNPEWSCYNFNFKPTKEYQKINEFYEETDTQGYNITFKNIPAEYIDNLVKKGQLYLFKIYSKDFSSYSKGTPNLHTLYFKMLFDDRNLKNTVYKLNGGAEIFYRKKSVTYPKNIMEKGHHAEDLKGKFNYPIIKDRRFTFDKFQFNISITLNPNAQGHGNINDICRNLIKSNNTNIIGIHRAENHLIYITVLNSSGDIIEQRSLNEIKSYGDKTVNYMEKLTERGKERNDARINWETIGNIKELKEGYLSNVISEIANIMIKYNAICVMEDLNYDFIRERTAIEKQIYQKFEKMLIDKLNFYVDKKKSQEETSGILKPLQLANKFTTFEKIGKESGMIFYVSPYKITDIDPVTGFVNLFDTRYFNIEKAVQFFDKFDDIYYNAKTDLFGFNFDYDNFINKEKIQNIKTKWTVYSYGERIERFNNNNIPKFKKIDLTKEFKNLFSEYSINYNSNLKKSIISLKDKNFFMKLLSLFRLTVQMRNGDFIISPVNDNLGNFFDSRNSDNKTLPENTAANGAYNIARKGLILLNRIKQTSDIKKADLKISGDEWLQYAQDENSYI

SEQ ID NO: 6429 - protein, 1300 aa, unidentified
  source 1..1300: note = MG29-106 effector
MNNKLTAFTGKYQLSKTLRFELKPVGKTLEHIQAKGLISQDEARAASYQKMKKTIDGFHKHFIELAMSTVKLTKLEAFQELFNASPERKKEESYKKELEKVQDSLRKEIVKGFSTGEAKEIFAKIDKKELITELLEQWMQRQNEDDFYFDEKFKNFTTYFGGFHENRKNMYSDQAQSTAIAYRLIHENLPKFLENIKIFEKIKAVPEVYEKCQVLYKEIEEYLNINSIDEAFELDYYNEVLTQKQIDVYNLIIGGRIPSEGKTKIQGLNEYINLYNQRQEKNKRIPKLKILYKQILSDRVSTSFTLDKFTKDQEVLNAVEEYYKFELLDYKPKDKEDTENVLESVKEIVAHLTDYDLRKIYLRNDTKITTISQKLFGNYGVFSTALAYYYTTVIKPNFIEDHQKGNDKKREKLDNEQAQFLKQSYLSLDLLQIALDHYIPTLDQEEDVVKRYSSNCLANYFKDYFKAEKEEGKDKEFGLIDNIKAKYSCIQGMLGTDYPEDKKLVQQKEELFNIKAFLDSLMELLHFVKPLSLPNDSLLEKDQNFYGQFEPLMEQLNGLIPLYNKVRNYATQKPYSEEKVKLNFKNPELLGGWPVDREIATSSVLFRDGENYYLGILDKESKKDFKNLPKPDNPNDVLYKMLYLQAADPSKDVQNLMVIDGKTVKKNGRKEKAGEFMGQNLILEDLKNTYLPDDINTIRKRKSYSKLSDNFSKSDLIAFIDYYKQRAIEYFHNYQFQFKNSDEYRDFGEFTTHINEQAYQINFTEISWKFIDELVNEGKLYLFQIYNKDFSSYSKGKLNMHTMYWKALFEEENLKDVVYKLNGQAEVFYRKSSIKNPVVHKANEAVANKNPLAQKKESVFEYDLIKDKRYTEDKFHFHVPITLNFKATGKEFINQDVIEFLHQNPDVNIIGLDRGERHLIYLTLINQKGEIILQESLNNITAENHPITTPYHELLNKKEKERDEARKSWGTIENIKELKEGYISQVVHKIAKLMVQYNAIVVMEDLNFGFKRGRFKVEKQVYQKLEKMLIDKLNYLVFKDVEPNEPGGLYNALQLTNKFESFQKMGKQSGFLFYVPAWNTSKIDPTTGFVNLFDTRYENLEKAKAFFSKFEEICFNPIDKYFEFKVENYASFNAKAEGSQQDWTVCSFGERIKTFRNPHANNQWDNKVNQLTEEWQGLFKKYNIDYRTELKEQILQQTEAGFFKAALDLFKFTLQMRNSITNSEVDYLISPVKNKQGQFFDSRQADATQPKDADANGAYHIAKKGLMWLAQINAFDGADWKKLDLDKSNKGWLQFIQNKK

SEQ ID NO: 6430 - protein, 1252 aa, unidentified
  source 1..1252: note = MG29-107 effector
MGMIGDQFIGQYSLQKTLRFELRPIGETQKLLQDFKEEVQGNLLEYDAERARAYPMVKKVLDDYYRYFIDQVLSGFAFDSQTINEVYEMYKKAKKDAEAAKEYAVHTKKLREQLSAAFKAPITYYMLDKYEHLFNRNRESRLFEWLDIRFENDHLTENEYDEIKDVLDKFDKFTTYFTGYKENRANLFVADEKATAIAYRVVNENMPRFFENCIRMENIKKRHLDLYKLLDSFEGYFVPQAYANIICQPAITDYNKIIGRPTQNPDEKGVNSIINEYRQKNQIKNRELPMMAQLYKQLLSDRITVFLDPVINNDEEMQSIVAETIEIARGLFSEVINLTAIHALADNSENIYINSSALANLSHRVYDDWNLIYRACEAKMIKLEGKQKKGLENKLKMAIPMSELQNIIEEYIATLDEELKLSYYKIPILCNYFQNPPLDDFESATLKFEQIVKTTTPRTDLIHAIKEVLDKAMEVVRFFKPLYLFKGRSPLEVPDRNEDFYNEFERLYAELNLISKIYDRVRNYATKKQFSQDKIKLNFNNPTLLDGWDLNKEQDNLCVILIRDGNYYLALMNRDYRRLFDLKNDEVRNKALGKAGDHCYSKLEYKQVTGANKMLPKVLFAATNSDLFKPSQEILDIRKTGSHKKEAGNIEALHKWIDFCKQSIATHPEWNDHFDFKFRSTSEYSELTEFYNDFDRQAYKIKFVDIKVEYIDQLVKEGKLYLFQIYNKDFSPYSKGRPNLHTTYWRMLFGNENLANITMDTDRPIFKLNGEAEIFFRKASLEKQITHAKGQPITNKSKKDNGKESESIFEYDLIKDKRYTEDKLFFHCPITINFRAPGTTVGSFNRKVNYFVERNPEVKIIGIDRGERHLLYYTVIDQKGNILEQGSLNQIHNSYTSAGRVVEHNINYRDLLHEKEKGREEARKNWETIENIKELKAGYLSQIVNLLSNLMIKYNAVLVLEDLNAGFKRSRIKVEKQVYQKFEKAMIDKLNYLVFKELPPGSSGHYLNGYQLTAPFTSFRDLGRQSGFLYYVYPSYTSHICPKTGFVNLLNTRYESIEKAISFFEKFNSIKYNPGSDYFEFDFDYASFGKDVARSQWCVCTAGEKRYYYANHDKTSRECNATQQIKELLDKYNIEYIRGKDLLPEIIKKNDKGFFNGLMFLLGVVLQMRYTVSGTSNDDDFILSPVMDEQGQFFDSRSAATSEPQNADANGAYHIALKGLKIISSISDGKLKTVNKNERQDWFAYVQNKMYR

SEQ ID NO: 6431 - protein, 1148 aa, unidentified
  source 1..1148: note = MG29-108 effector
MEQKKSIWDECTNLYSLQKTLRFELVPVGRTREHINQKRLIEEDEELAKKFNDAKKIMDDYYKFFIEDRLKKVRIEEANLKEFEKIYRDLKKDRSKDKKKRDEFSKIQKKIRNDIHKKLFEDTPEKSFGKDFLTKTLPEWLKSNNREKDSSTIKDFQRWTTYFKGFFKNRENVFSKDDIHTSFIYRIVHDNLPKYIDNLDRYDTLKRYSDFKDEQLCKSFSSELKGQTLSEFFIVENFNECLNQSGIERFNLIIGGKSLDDNKKIQGINETINLYSQRKTYEEKREVRRLFMLPLFKQILSDRTSSSFVLSAIKDDAEVISYINDFYSIISNYFELLQTVFKQLFEFNTKQIYIHKASLNDVSRQIYDDWMILETGLKFFAKEKLKLTTEKKIEEWFKKKAYFSLDEIKQSIEYLQSENVDPKKVVEYHKTITRDNKPIIDAIKADYVAVKELNLNKGERKLLTEQREEDVTKIKQFLDSVMNLYHFLKPFSVGVDADSETGSFAVEVDAEFYKDFSEIYARLAEVVPLYNKVRNYITQKPFSRNKFKLNFNESALLDGWDKNKEHDKNYSFIFRENDSFFLGITSTDEDTNILREDIHPEIFVEDSFFRKMVCKDLGDIKRQLPRMGFSNKAKTGVEVIGWNQDIEDIKKDFDEFQEKKKNDKKLWGENFDRNKLVKLIDYYKSVLKNHSEKYEETNNITYKPTADYRNLGDFFDHVQSQTYKVTFVGIDKDYIDALASEGKLYLFQIWNKDFSPLSKGRKNLHTLYWQELFSPKNLSDVRFKLNGKAEVFFRRKSIAPIITHPKNKPITNKNPIRGKKERTLSYDLIKDRRYTEDKFFFHCPITLNFKSSGSDNNKYINLKINDIIKKNPDVNILSIDRGERHLLYYTLLNSKGEIREQKSLNTVFDDVQREHSYHDKLNTLEVERQAARKAWKTIRNIKELKSGYLSQVVHKICKLSIDHNAIIVLEDLNSGFKRERFKVEKQVYQKFEKTLIDKMNFLVFKERPHNIPGGVLYAYQLTSKFDTFKKMRKQTGLLYYVDARYTSKICPKTGFVNLLYPKYTNVSAAQNFFRNFESITYNTKEKYFEFKFRYSKFISEQKPSARKNSDLPNNYYQKEWTVCSFGNRLVPKRSSKNIVEILDLNPTQ

SEQ ID NO: 6432 - protein, 1316 aa, unidentified
  source 1..1316: note = MG29-109 effector
MKLTDFTNLYSLSKTLRFELIPQGKTLQHIHEKRLIEQDKQRDIDYKKLKKIIDEYHKQFIDQSLKGIVLNDLDSYRTLYQKKEKDDQEKKNFDKVKSLLRKQISDAFKSQEKFKTLFAKELIKDDLLKFVQEEEKELVNEFKDFTTYFTGFHENRKNMYVADEKATSIAFRLINDNLPKFIDNLNIFEQIQKENSNIIENFRTALLEMEDMTQGLELEELFSLNYFNETLSQRGIELYNTMVGGRFVEEGKDKIKGLNEYVNLYNQQQSDRKKRLPKFKQLYKQILSDRNSTSFVIDQFQNDSELLECIEQFYQSGICNYESDGNTINVLLSLQNSLRSLITFDLSRIYLRNDRSITDISQSVFGDWNVIRSALSDYYESTFPINAKEKIAEYEDRKEKWLSKSGYFNISTIQTALNGYKNDNITIKDRGNELINYLASCGFDLESNLNLVEKISKSYADIRDLLNQPYPDQENLKNDKKNIGLIKQFLDGLMDFIHFIKPLNVNEEGLEKDQTFYSLFEPLFDQLSKTISLYNKVRNYLTQKPYSIEKIKLNFENKGQFLGGWVDSKTEDSDNGTQAGGYLFRKRNEIGEYDYYLGMSNDVKLLRTYLKHRIQEKDKSDYERMDYYQLKTASIYGNSYMGNLSYKEDKERLISAIVNYLKKNGEETAFLAINDYLNNNKLTESRTPSGCLNILSKDYQHTFKRIIKDESFLKVNNEVVQNLKETLKTLVRVPKGMEYANKQYTLFPEVIADIEELSKIKLFLYFPVCQKELDDALIRTHKPLFLFKIVNKDLSFAEEFIKGKRKSRGKDNMHTLYFKQLMSGAQDIIDIGTGEVFYREASIEGNITHPAHQAINSKNPLKKGEKRTFKYDIIKDKRFATDKYFLHLSITLNYQKPKQAKDYELIVKKYLRNNPDIKIIGIDRGERHLIYLTLIDQQGNIIKQESLNIIEDKKHNINTPYHTLLSEKEKGRADARVSWNTIESIKELKEGYLSQAVHKMATMMVKHNAIVVMEDLNFGFKRGRFKVEKQIYQKLEKMLIDKLNYLVFKDIEPTAPGGLSNALQLANKFKSFEKINEQSGFLFYVPAWNTSKIDPATGFVDFLKPKYENIEKAKDFFNRFQKIRFNPQKNYFEFHFDYNDFTTKAEGTKTEWTVCTFGDERYAWNRKLNLGKGAMEKINVTESLQLLFHDFDISYATGNNLIQDILEQNNADFYKKFIRLLSISLNLRHSNGKTGNEQKDFILSPVCNNQGEFFNSENAGETMPKDADANGAYHIALKGLWALNQIDKADDLKKIKLAISNKEWLQFVQTKPYNKK

SEQ ID NO: 6433 - protein, 816 aa, unidentified
  source 1..816: note = MG29-110 effector
MQTVFDQFTGLYSLSKTLRFELKPIGQTKELLEDFYKHCEGNPIVVDEQRICQYPKMKDLLDDYYRLFIDKTLSRPIFSAEEITKAYELYCAAKQSHNSKQKESKYQKEYTAAKKSLRKKLAACFAEQKEEFGLDKYSHLFGSEQLPLNCWLQSRLQGGQITAAEYEEGLAALKAFERFTTYFTGFKENRDNLFAEVDKASAIANRVIEENMEKHFFNCRALADSTQKYPQLAEELGSFLSFFMPAYYGSCLSQQGIDCYNQAIGKELNGDSTKGVNQIINEYRQKYSLKTKDLPTLITLHKQLLSKKPDCPVSETLTTDQEMLQLAKYCYTTAISRLNELQKIMSDYLNDENLQFIYLKTKDLNALSKKMFGEWDTIRNAYFYHCQQLADKEQKRFAANTKEVISLGLLQRLLNSYLPGSENPPPLVDPALYFKSFDLTPLRQAYEAAAPVLALTQLDQDKAPPNEGNPKGGLGYRQTILVKNLLDTILRAKDFYKPFLLEQDGKPIAVADSNELFYTQFTAAFAKLNCLYKKYNLIRSYASQKPFSTDKFKLNFNNSTLLSGWDLNKEEENTNILLRKDGQYYLGILKNTKLFADCSKYLCQDSVEHYEKMVYKQVSGVNKMFPKVFFAAKNLELYKPSAQILQIKAQKSHLKEANNPDAKNAWIDFCKDSIAKSEWPQYFKFKFKPAEQYPDVNSFYREADAQMYSLTFQNVAGAFVKQAVENGELYLFEIYNKDFSAYSKGKPNLHTLYWQMLFDEQNLHNIADNAEQPVFKLNGEAEIFYRKASLDDRVTHPAKKPICNKNPLNGKKTSTF

SEQ ID NO: 6434 - protein, 964 aa, unidentified
  source 1..964: note = MG29-111 effector
MKSFSNLYSLSKTLKFGLIPEGDTLSNIEKAGILAEDEKLAEDFKKVKKIADQWLKTFINDSLTGAYLNLEDLLIFEEKYSIFPRDEKDEEEFNDIKAKLRKEIVSYFIRNPKFKLIASADLIRKELPAFVVTDEEKNLVAKFKTFTTYFTNYHKTRENIYSAEEKHSSYAYRVINENLPLFIANKKNFETIKNSYPELIEDIKKSVEPILNGEKVEDMFSLKWFSKTLTQSGIDLYNKMIGGESLEDGKKIQGFNEKVNLFRQSNKLDGKSVPMLKQLRKQILGDKNVPSWVTEGFANKESMKNAVMEFHGKIKPVLFTVADIFAIENCDYSNIFIKSRFLTDLSHELFKDFNFLKNILLEKYIVNNPKSKNQEKEFLGIAYFTVADIQSVLPNTDKDFIFEFFYSKIINTVAGIRQSYELWTANQESVPVLKSLMDNIIALHRTLKVFDVEGLGKDPVFYEPFDRNFEGMDGAVKFYNEVRNFITKKPYSLEKIKLNFGNSTLLAGWDANKELDNSSVLLRKGDYYYLGIMDKKHNKIFRNAPLAEKGEESYRKMEYKLLPNSYMMLPKVFFSKGNMSKYEPSEEILKIYETGAFKSGDNFNIDDLHLLIDFYKESIAKNEEWVCYNFNFKPTEDYQKINEFYNDIDSQGYNVNFRDIKASYIDELVKEGNLYLFKIYNKDFSPYSKGTPNLHTLYFKMLFDERNLKNTIYKLNGGAEIFFRKKSLNYSEETLKKGHHAEELKDKFDYPIIKDRRFAFDKFQFNVPITLNPNALGFGNINDAARDFIRSNDIKVIGIHRAESHLVYLVVLDSKGKIIERQSLNEIEGYNGKSINYMEKLDERGKERDEARVNWQEIGNIKELKEGYLSNIISKIAALMVRHNAVCVMEDLNYNFMRERSAIEKQIYQKFEKMLIDKLNFYVDKKKNPEELGGLLKPLQLANKFISFEKMGKESGMIFYVSPY

SEQ ID NO: 6435 - protein, 848 aa, unidentified
  source 1..848: note = MG29-112 effector
MKKTLSDFTNIYSLSKTLRFELIPQGKTLENIEIKGLLKQDEDRAEKYKKVKIIIDEYHKDFIEKSLNGLILDGLHDYMSLYLMTIKEDKDKKAFDKEKEKLRKQIANAFKNNEKFKTLFAKELIKEDLMNFANEQDYEYIKAFKDFTTYFTGFHQNRENMYVVDEKATAIAYRLINENLPKFIDNLKIFEKIKNEAPGLINQLNKVLSEMEEIVQGKTLEEIFSLNYFNQTLTQTGIDLYNIVIGGRTPEENKIKIKGLNEYINTDFNQKQTDKKKKQPKFKQLYKQILSDRHSVSFMPESFENDNQLLESIEKFYTNELLHYSTEGKSINIFEAIKNAVGNLSSFNLSKIYLRSDTSLTDISQKVFGDWGMINKALQDYYEKIYPLKPKEKQEKYEERKNKWLKQDIDIQTLQTAIDHYENETVKEKNNSKIITDYFANFGINNESKIDLLQNVYQNYNIIKDLLNTPFPESEKLGSNKELVSLIKTFLDSIMNVIHFVKPLSLKDSDKEKDESFYSLFAGLYDQLNHTISIYNQVRNYLTQKPYSTEKIKLNFENSTLMDGWDLNKEADNTTIILRKDNLFYIGIMDKKNNHVFQHIPERTDNEPHYDKMIYKYFPDASKMIPKCSTQLKTVVSHFESNITDKIIEGKSFDSALKITKRIFELNNFVYDDISKTMVLSEDNEKRPKMFQKKYLEISKDIDGFKDALKDWINFCIDFLNKYESTKHYSFNFKNSELYNSLDEFYGDIDTQTYKITYKNIPVSFIESLVNEGKLYLFQIYNKDFSPFSKGKPNLHTLYWKMLFDDENLNDVVYKLNGQAEVFYRKSSIKESNKIIHKANEVLTNKNP

SEQ ID NO: 6436 - protein, 822 aa, unidentified
  source 1..822: note = MG29-113 effector
ELEEAADALKPLLSLEQLNKKRIPPEGDSEEGSEGFEQVRRIHECLDAHMSLQQVLRPLHLVLGRKPIDVASKDLGFYARFDEAIEDYNAMTIALYNKTRNHLTKKSFSTDKVKINFESPTLLAGWDLNKETANKSIILRQNGKYYLGIMHPRHPKIFSKPPEAKVGDEAYEKVNYKLLTGANKMLPKVFFSKKGLETHNPSEQILALYKNGEHKKGDTFNIESCHKLIDFFKSRIPLYKRDPSDPYGWEIFDFKFSPTKTYKDLSGFYREVEEQGYKLWFTHVTKAYIDEQIEQGHLFLFEIYNKDFSPFSKGKPNLHTLYWKGLFEQNNLDDVVLKLNGEAEIFYRKHSIAANEQIVHSANKAIVNKNENNPKPESTFEYDLVKDRRYTKDKFFFHVPITLNHKAQKPVRFNDQVNRALQKADDVHVIGIDRGERHLLYYTVVNQKGEIIEQDTLNTISTDQDYVVDYHHKLDQQERTRDKARKAWTNIDNIKELKAGYLSHVVHKLAELIVKHNAVVCLEDLNFGFKRGRFKVEKQVYQKFERALIEKLNYLVFKDTTEGQPGHYLKAYQLTAPFESFKLLGKQSGILFYVGASYTSKIDPATGFINFLKPHYESLAKSKTFFESMDSICFNAKRGYFEFSFDYANFSVPQTLDDYQTAWTVCTHGETRYHNQRNDKGIWETKAVNVTEKLKVLLNEAGVSYQNGEELKDAIAAVKSSKFYRSLYFLLRLTLSLRHSVTGTEEDFILSPVADEGGNFYDSRNASDAEPKDADANGAYHIALKGLWNLEKIDQWDGESRLNLAMKNVEWFQFASEKPFKE

SEQ ID NO: 6437 - protein, 1383 aa, unidentified
  source 1..1383: note = MG29-114 effector
MMSNLLADFTNQYQLSKTLRFELKPVGKTAEWIEKHDIIGVKNDELFGKDAEKAKHYKYAKRLLDAMHRLFIEDALALFRNPEFSQPLESKFKVLQTQDELKIDDDLENIFKSVFDHTAIRWIEEYQQQMPDFWQEDLAELEQKLATANDTKKRKGFQSAVKAIQKKLKDPSKVIKKEDIKVMYSNEDAIHLLEWKIRTEKVKITFKELEQGDNNNFIPVQILCEYLREFNQFYTYFSGFNENRQNVYDLSGEKSTSIINRTINENLVFHFANLKKWQKVKKSLLDATNILAQKGFDAKASLAKIEADLQFNADAFFTVRTFCSSMCQSGIDRYNEIIGGQPALEGREKVQGINEFINLCRQQAGAKRQKFPPMQILYKQILSKSDKTFIPEFSDDKDLFNEIEKFHRDFFVEKNEKGRNLFENFIQASSELANDLTEEYDNIFLPCDKVNRLSNLLTGSWKNLKDEILEIIGEKEYTKRKNFSFTEITKALEEGKKMEHFSIDAKYSGQSLIHFFVTRFQEMLDTANTAWEDLLKKDVLNQEKLDDDRSEPGKKGFEQIAAIKAFLDAAIALAGFVRDWQADKDILKKDEPNRIWYDHLDDFTAKLQIIGLYNMTRNYVTKKPGATEKLKITFENATLLNGWDRNKETDNYGILLEKDHQFYLAVMTAKSNRLFDYAESSDDTEKKAQEKCEKRQLILASSNENCFRKINYKLLPGANKMLPKVFFAAGNEKLFNPSAEIVKIKQDKLYTKEKIEIHGKKNLYDYIDFCIKSLCKHPDWSKAFHFTPDSFKKPSEYESIDQFYRDVELQGYSISFDKIKESYINKKIESGELYLFQIYNKDFSQNKKKKGTDNLHTIYWKGLFEPENIKDTVLKLNGQAEIFFRKASIKYTPDKLAEGHHAKELKGKFSYPIIKDKRFTENKFFFHCPITLNFGAPSIPKKFDIKIRKFLKNNPKVNIIGIDRGEKHLLYYSIVNQDGKIMEQGSLNTISNGFIPNGTTESRPIDYHEKLDAVEKKRDIARKSWSMIENIKELKAGYLSQVVHKLAELIIKYNAIVVLEDLNMGFKRGRFGVEKQVYQKFEKALIDKLNYLVFKSEKDRSNAGHYLNAYQLTNKFESFQKMSQQTGILFYTTASYTSTTDPKTGFLKNIYNQYKSVEKSVEFWKSFDSIIYNQPKDRFEFTYTLGKVASKNMYREKDEKETQLKKRTWTVCSCVTRSRYKKAQESQTEEQKQNTSSEQIGKRGKHEIFFVTDKIKETLQNNGIDFTKNKDIQALLITKNARSDASFQYSMLYCFNAIMSMRVTDDDKEKGSKENDFILSPVEPFFDSRTAPSSFPKNGDANGAYNIARKGICILQKINAADDVSKVSPGISKQDWQNYAQSH

SEQ ID NO: 6438 - protein, 1095 aa, unidentified
  source 1..1095: note = MG29-115 effector
IAYRIVHENLPKFIDNISIYENIKSNNKDLDFSPILNEMEDIIQGKTLDEIFTLDFFNNILSQNGIDFINHIIGGRSGEAGEKKSKGLNEHINLYNQQQKDKKKRAPKFKKLYKQILSDRGSISWLPEAFEKDEEVLDAINNFYREGLENSVIDEKNVNILNEIESSFKSLLNYDDFSKIYIRNDTAITDISQTLFSDYSILGRALNYYYETFVNPKWITDYSKATETKREKLEKERDKFTKSTYISIDILQKSLAEYIKTLDTDSEIKQKYTPTLIANYFTHHFYAKDENGNETEKTLTYQIVSEYNGLKGFLNTEHSEDYKLIQDKERVHQLKTFLDSIMNLLHFAKPLYLDKNASEEKNELFYTEFTPIYDELAKIVPLYNMVRNYLTKKPYSTEKFKLNFENSTLLDGWDVNKEKDNTGVILLKDDNYYLAIMNKQNNTVFEEIPKAINPQNTFKKMNYKLLPGPNKMLPKVFFSKSRTKEFGVSEKMLENYENGTHKKGDNFNLSDCHQLIDFFKASIQKHEDWKQFDFNFSETKMYEDISGFYREVEHQGYKITFSDVSEEYINQLVNEGKLYLFKIHNKDFSEYSKGKPNLHTLYWKTLFAPENLADVIYKLNGEAEIFYRKKSINIDKAVTHNAKEKLENKNPNATKKISVFDYDIIKDRRFTFNKFQFHVPVTMNFKSTGNDFINPHVNEFLKNNPDVKIIGLDRGERHLIYLTLIDQQGNIIRQESLNTIKDEKHNIETPYHLLLDNKEEERDKARKSWDTIENIKELKEGYISQVVHKIATMMIEHNAIVVMEDLNFGFKQGRFKVEKQVYQKLEKMLIDKLNYLVFKDKPANEAGGIYKALQLTNKFTSFRDMGKQTGFLFYVPAWNTSKIDPTTGFVDFLKPKYESIEQVKTFLRKFKNIYFNSTKNHFEFSFDYKDFTTKADDTQTEWTICTHGDRIEKFLNSINKWDERTVTLNDEFVTLFDKYHIDYKDSKILKEKILQQTEKTFFERLIYLLRLTLQMRNSKTGTEIDYLISPVADKNGNFYDSRKVSQNLPKDADANGAYHIALKGLWVLQQINKTEDLKKVKLAISNKEWLQFVQK

SEQ ID NO: 6439 - protein, 751 aa, unidentified
  source 1..751: note = MG29-116 effector
VISLYNKVRNYITKKRTSIKKFKLNFRNSTLLDGWDLNKEKDNFSIIFRKSKNYYLGIMNKENNKIFDNIPKEYLISNNNSYEKMIYKLLTNPNRMLPKVFFSKKKIKYFNPSGEILDIINHSSHTKNGKVKEGYSKKDFNLNDLYKIIDFFKKSIEKHPDWKNFKFNFKPTKDYKDISEFYNDISSQGYKLSFINISNEYIENLVNNCKLYLFQIYNKDFSKYSKGKKNLHTIYWKELFSKENLEDVVYKLNGKAEIFFRKKAFDAHITHPKNIEIKNKEFRKEYFKLGLKPTSKFKYNIIKDKRYTYDKFLFHCPITINFKAPSNNFYLDYKINEIIRNKSNSVKILSIDRGERHLAYYTLLNSKGEIEKQESFNLVNDKFGRKLDYHNKLDKLEGNRDQARKNWNTIENIKELKEGYLSQIIHKIAKIVVEENAIIVFEDLNSGFKRGRFKIEKQIYQKFEKMLIDKLNYLIFKDNDKYSIGGTLKAYQLTKKFESFQKLGKRSGIIFYVNASYTSKICPVTGFTNHIYPKFENIKKAQELFKKFKFIRYNVKKNYFEFNYDIKNFNKKLKLNRMNWTLCSFGDRLVTFKDKNGFFNTKKINLSDKLKDLFDTYNINYINERNLIDDIISQKDKKFFKNLIFFLKTLLSLRNSYTESEVKEIMHKNSENFKLNDYDYILSPVEKDGVFFDSRKANNLQPKDADANGAYNIGLKGLMIIDRIKNTQESSNVNLNIKKEDFLNFVIEKNK

SEQ ID NO: 6440 - protein, 794 aa, unidentified
  source 1..794: note = MG29-117 effector
GGKGFQQVQQIKAMLEAFNNILHSLKPLHLVKGRKPIAPNDVDTSFYTLFSDRFEKYSNQLIPLYNKTRNHLTKKSYQTEKFKLTFSNPTLLDGWDVNKESDNLGVLLRKDGLYYLAIMHSEHRKIFEQAQEAGVGEDCYEKVNYKLLPGPNKMLPKVFFSKKGIEQYAPPAEILRLYKNEEHKKGETFKLDSCHKLIDFFKANISHYKKDANDVGWAVFEFQFSPTKNYEDISAFYKEIERQGYKIWFTNIASKYISDTVTAGKLFLFKIYNKDFSLHSKGAKNLHTLYWQGLFEQNNLKDVVLKLNGEAELFYRKRSIETSNQIIHLANQPIKNKTKQAKQGSSKFKYDIIKDKRYTQDKFQFHVPITLNFKSANVKQFNHNINTAIQHDESVNIIGIDRGEHHLLYYSVIDQNGTIIEQDTLNTIDTGGKGYIVDYKDKLHSKEQERDNARKSWGMIENIKELKAGYLSQVVHKLAKLIIERNAIVCLEDLNSGFKRGRFGIEKQVYQKFERALIEKLNYLVFKDTERSDEAGHYLNAYQLTAPFDSFKKLGKQSGILYYVPAAYTSKIDPATGFINFLNTHYESVKKSQTFFKNMDKICYNAKENYFEFHFDYNKFEVNQDLTGYQTKWIACTHGGDNRYHYNVKQRTLDKINVTDKLESLLQQYKIQYKHGEDIKEVIGKIDKADFFKTLLWLLRLTLTLRHSDRNNDEDYILSPVKDKNGVFFDSREQEKLPREQQTLPIDSDANGAYHIALKGLWNLQQINDWDSTGKLNLAMSYNDWFKFVRQLKQ

SEQ ID NO: 6441 - protein, 1270 aa, unidentified
  source 1..1270: note = MG29-118 effector
MKLNKFTHQYPISKTLRFELKPVGETADYIEDFKSQYLKDIVIQDQQRAEDYESIKVIIDEYHRHYIEEKLSEPFDKKTGELFISGDEFENAFSYYQRFRENSKDEKARKEWIEVQNSLRKSLVKVFSDRKKRLFQKELITKELPSWLKEKGEWEDKKNVVENFNRFTTYFTGFNENRENMYSHEEQSTAISFRLMNENLPKYFNNCIQYHKAIESYDGLSFTVNPDLLNEMGVSILSEIFQPSYYIQLFTQSGIDKFTELLGGFTKENGEKVQGLNETINLFRQQKAIKAKAFPNFISLYKQILSDRETSSFIPDQFENDNDLLKSLGKFIKEMVKEDGLFKKLEDSIKLITDADLHRTFIKNGVEITKISQSIFGNYSILKSAIYHHAESVLYPDPISGKISEALKEKRIKYVNKQVVFSIAELETILSNYASQMTDDNPDKEIIAQCENSEHPIRTYFLNAIENVKNDKDIEFGKAIENVLPLISLENLNKGKDGQAQTHKIQKMLDAFLAVTHAVKPLHLVKGRKPIDIPDMDMGFYAEFSKAFENFEQLVITLYNKTRNHLTKKTFSTDKIKINFENPTLLDGWDANKEKDNSGVLFEKDGNYYLGIMHPKHKNIFNYIKGINDIESEKRSLSKDELFNKIVDGESEHYQKIVYKLLPGVNKMLPKVFFSGRRIDFFAPSTEVLKIRNSASHSKNGSPQKGFEKEDFNLKDCHTIIDFFKKSIEKHPEWKEFEFEFSPTSSYEDLSGFYREVEHQGYKMDFHPIKKSYIDQCIEEGKLFLFQIYNKDFSPYSKGKPNLHTLYWKALFDTENLKDVVAKLNGQAEIFYRKHSIKKDERTIHRANKSLQNKNENNPKKTSLFEYDIIKDRRYTVDKFQFHVPITLNFKMEKMTQFAHNEKVNQMIVKSENTHVIGIDRGERHLLYYSVINPKGHIVEQGTLNTISTDKGYEVDYQQKLDSKEKARDTARKSWTTVENIKELKAGYLSHVIHKIAFLIEKYNAIVCLEDLNFGFKRGRFKVEKQVYQKFEKALIDKLNYLVFKDAKPNEPGHVLNAFQLTAPFDSFKKLGKQTGLLYYVQASYTSKIDPVSGFINFLYPKYESLLKSKIFFESMDGIRYNADKDYFEFSFDYRKMTPNRNLEGYQTKWTACTFGEKRFKNIRNAHGNWESVEVNVTEALKKILKNEDVDFKSGHDLRFEISKVKSTKFYKKLFKLLQITLSLRHSKTGTDEDFILSPIVDENGKFFDSRNAPKAQPMDADGNGAYHIA

SEQ ID NO: 6442 - protein, 1306 aa, unidentified
  source 1..1306: note = MG29-119 effector
MLCSECVGGLKMTKFNEQFIGQYSLSKTLRFELKPIGKTAEMIKANGFLEHDTKRADNYVLVKRFLDDYYRYYIEETLKGKELDKDLVEKAYSAYIGNNADECEKINKELRERVSKIFVDKDKYGLEKYKELFSVKQNRKTNRTEGILLSWVRNNDKYSQADKEKYEELIVYFNKFTTYFKGFKQNRDNMFSAEAEVTAIANRIVNENMYRFFDNVKNFENIKEHYPDLYKEFVQVEQYFVPSAFGKILSQSAIDNYNQGVIGRFENDLDAEGVNQVINEYRQNCLKDGKEVKKLPTMITLYKQILSEDKSENILEKENIDTDEKAINLVKESYKILTENVKEIKKLIDYSITEETLDTIYIKKIEISTVSNAIFGNREIIKDALNYKKEKYKEVVCVKTISDAIKEYKQVYDGEIFDWKDKNIDDLFVKYFSSFYTGYVTKSKNTKKQKDEIVNIIEYVDNIKKELDTIVSNDVRDYKNILDKMNAIVRFYKMFYLYDGMKKLDIRGKNEYFYNHFELMYFDIREINKKYNEIRNYATKITQPNNGEKLKFTFDASTLLDGWDKNKEKDNLSILLVKNGKYYLGVMDNENKKCFDFENEDVAKKAGQVGETYQKMEYKQISFNYGGLGGFVRKCFNTAQQFRWTCPKDCLNEEGKIIITDEEARNNLVKIIDCYKDFLNKYEKNGFKYKDFSFQMLPSDQYSKLSEFTQDIERQRYKLWFRNVSAKYIDELVEQGKLYLFQIYNKDFSDNKKQKGTDNLHTLYWKALFSPENMNKTDGAIIKLNGEAEIFYRFKADGIPVIHKKGSILLNKISKYGETIPSKIYKRIFDCLNGRIEKQDLNEEERKWYDKAVWKEAKYDIVKDKRYYGDDGKYFFHCPITINFRCKEKVNGNTFNQEINQFVANNPDIHIIGIDRGERHLLYYTVIDQQGNIIEQDSLNNISSDYVANNKLVPHKVNYHDLLDKREQERADARLAWTAIENIKEIKSGYLSQVVHKLALLVEKYNAVIVLENLNVGFKRGRFKVEKQVYQNFEKALIQKFNYLVFKNRSYAENGSFANGYQLTAPFTSFKDIYRQTGILYYVDSSYTSHICPKTGFVNYINSYLKYTNVEIAKLTLAKFDGFKFNNAKGYFEFAIDYDKFINGKIPLGKWTICTVGQERYSYDAKNQTTIKYDVTKELQNLLVKYNVAYEDGKDLLGKIKDIDEKGFYSALLYWLRLTMQLRYTVKGTENEDDYILSPVADKNGNFFDSRKAQDNEPKNADANGAYHIALKGLQLIQNIDDGKLAKPEKNMENAKWFKFARERNS

SEQ ID NO: 6443 - protein, 1395 aa, unidentified
  source 1..1395: note = MG29-120 effector
MADNGRSLANFTNQYQLSKTLRFELKPVGQTAEWIKKHNIIDVDGDKLTGEDADRAVNYKYAKLLLDELHRQFIEDALKLAPEAEFTKKLKDKIIELYSASEIKDADLPGNIFKQILNNKADEWIKLYQQEMPQYWQKEFDAKIANETSEKKIKYLRNSFDKLNKRCQEQPFKNSGVDVLYGSNEDPIKLLEWAVRKEKVRPTFGDIKHEGNPEAIMPKERIIEYIIRGFDNFCTYFAGFNENRANVYDVTGAKSTSLVHRIFMQNMQFHFNNIRKWEKIKASLEKYAKDLSEKNYNCHARLAECERELNFSANEIFSPEAFINFINQSGIDRYNEILGGLAQEGGKTKPRGINEFINLVRQQTGAKRNEFPPLQLFYKQILSKSDRTFISAFETDEEMFDRIKDFRQKCFIESEAGKLPVIQEFIKDITRLIAESLDEKTNIFISKDKLTRISQELTGSYNTINLRMLSELGEKAFNQNGSFSIQQIDNALNAVVDGKKFSSQDQNIKAEYQSNSGNILFDFFSKRLDALFVSIEASWKILHESRVLTGKILDKNRENEGDKGFEQVAAIKGFLDNSIEILGFAKDWMLQEKKLSENINTVWYETLQLFCDQFPIIKLYNMVRNYVTQKAYSDKKLKLNFDNSTLLDGWDRNKESSNYGVLLEKDGLYFLGIMTPESNNIFDYEIADADSLNKKQEKQELANAIKSSGGEKLYRKVIYKQIADVSKDIFTLCWDENNNKAIRKTKGREAIWGENITRIKEAKSYQNNEADKKHYFGYLIKCANSYWKHFNIKLKPADEYEDFSSLIKDIDIQGYKINFDNIKKSYIDEKVAKGELYLFQIYSKDFSQEKKGGGNDNLHTSYFKLLFDEENLKDTVLKLNGQAEIFFRKASVELTEEKKAKGHHYEELKDKFNYPIIKDRRFAEDKFFFHCPISLNFKAEKSIPQDKYKPSFNSNFNLQIKTFLQNNPEVNIIGIDRGEKHLLYYSVINRNGNVIEQGSLNTIAGFKGREIDYHANLDKKEANRDKARKSWSAIESIKELKAGYLSQVVHKLAQLIVEHNAIVVLEDLNYGFKRGRFKVEKQVYQKFEKALIDKLNYMVFKDKEHRLVSGHYLNAYQLSGSYHLDSLKSQKQSGILFYTAASYTSTTDPVTGFLKNVNVTYENVEESLKLWESFDSIIYNPIKDRFEFIYTLGKIAGKSTDKEKDEEEISKKQWTVYSCVDRSRYIKPESTEEQKQASDRNSIGKLGKHEIFCVTNEMKKLFENANINYKEDKDIKKVLLEQNNASLHRSCLYFFNAIMAMRVTDSSKKSGTDENDFILSPVEPFFDSRKKYTKLPENGDANGAYNIARKGICMLNKIDAAENLPKINLLITKRDWQEYAQSDAVVKAQTAKLNK

SEQ ID NO: 6444 - protein, 1232 aa, unidentified
  source 1..1232: note = MG29-121 effector
MLQNFTNQYQLSKTLRFELRPVGKTKEHIEAKGLIIQDEQRAEEYKEMKKIIDRYHKAFIEDALNGIAIEGLETYEKLYFAIKDEKGKKEFEKLQDTLRKRIVELFKKHPKWSTLFKKELIRNELLTFLDSEEIPEEQKINEKEIVLKFVDFTTYFTGFHENRANMYIDEALHTAVAYRIVHENLPVFLGNKKTFEQIATKYPELIADSKDAIESHLFGAVFEDMFTLAYFSHTLAQNHIDLYNTMIGGKVSNDGSKIQGFNEKINLYRQKHGLSKRDLPNLKPLYKQILSDRESLSWLPEAFEDKNELAEAIKTFYQNNIIAFECCDGKVNLLEKFPEIFKENQYYDLSKIFIKNDKSLTDIAQAIFGKYGVIKEALWEKHLRDNPKAAKSKDISADEERFFNKKDTYFSINDIHIALKAGEDRVQTGLDFSINDIHIALKEAQSPSDILTYFSNEIKPLTKAVQVAYKTWLDDQEKTERIKEVMDALLAWQRFLKPLSVKSDVDRDIAFYATFESYFESLSAVVKLYDKVRNFMTKKPYSLEKFKLNFENSTLLDGWDVNKETDNTAILLEKNGLFYLGIMDKKHNRVFKNTPESQDDSSYRKINYKLLPGANKMLPKVFFSNSRIDEFAPSSDIISNYKKGTHKKGEIFDLEHCHKLIDFFKSSIQKHEDWKNFEFKFSDTASYKDLSGFYREVEQQGYKITYKNISQSYIDTLVSEGKLYLFQIYNKDFSPYSKGTPNMHTLYWRALFDEKNLADVVYKLNGQAEVFYRKKSIIYSDEVMQKGHHAKELVGKFDYPIIKDRRFAFDKFQFHVPITLNFKAQGYTNLNAIVNEMIASGKEDIKIIGIDRGERHLLYLSLIDAQGKIVEQYTLNQIINSYNGKDHVINYHEKLAKKEDERAKARVNWGTVENIKELKEGYMSHVIHRIATLMVEHRAIVVLEDLNFGFKRGRFKVEKQVYQKFEKMLIDKLNYLVDKKKSPNELGGVLNALQLTNKFESFEKMGKQNGFLFYVPAWNTSKIDPVTGFVNLFDTRYASVEKSKEFFGKFKSIRYNSEKDYYEFEIDNYTQFNPKAEGTRQNWTICTYGDRVLTYRNSEKLNQWDNKTVQLTDGFKTLLNGQADNLKEYIVAQNDKAFFEKLLGLFRLTLQMRNSITGTDIDYLVSPVVDENGVFYDSRVCDDTLPKDADANGAYNIARKGLMVVKKIKEAQDIKKPDLKITNKEWLQFAQR

SEQ ID NO: 6445 - protein, 813 aa, unidentified
  source 1..813: note = MG29-122 effector
GLKEYFIKNYNLSNKKIESRLNQKYFSISEIQEGVKLLNLDRINYNDFSDHFISDYFKNLINEKIIDEITNHKLDFDKINYNNLNSFSDNEKQLIKILLDSILGFYNSIKPLYVNIKSSQEEKTQEAYELDSDFYNDFQIIIDSFKKIIPIYNKTRNYLTKKPYTTKKFKLNFDNSTLLDGWDINKEKDNYSLLFKKDNQYYLGICSKGNSTDISKYIQKKVFNSGDYFEKIDYKLLPGPYKMLPKVFFSKTNIEYFSPSEEIISIRNYASYSKNGTPQKDFDKEEFNITDCHKLINFYKFSLNKHHEWKNFNFNFKPTDQYKDINEFYQDVEDQGYNLSFKNIDSKYILDLVDSGKLFLFKIYNKDFSKFSKRTPNLHTIYWNELFSEENLSKLIYKLNGKAEIFFREKSNIKNNTIHGKNQLIQNKNPINNKTESIFEYDIIKDKRYTQDKFLFHCPITINFKSRGNGKDIHKQINNYIKDFEGNINILSIDRGERHLLYYTLLNSDGKIISQNSFNNISDGFNRSFDYQDKLDQREKERDQSRKSWTAIENIKYLKEGYLSRVIHEIAKIAIENNAIIVLEDLNFGFKRGRFKIEKQIYQKFEKMLIDKFNFLIFKKRSKESIGGALNGYQLINKFESFSKLGKQSGILFYVPASYTSKIDPTTGFFDLIRPKYESVDKSIQLIKKFEYIKYNSDMDMFEFNYNYFNFNNELKLDRKNWCIYSNGSRLYNFRNKDKNNEWDTKEINLTKELKDLFESYSIDYNSTQNLIDRIILIDHKDFFEKLIYILKLMLQLRNSIPNSKEDYILSCV

SEQ ID NO: 6446 - protein, 1278 aa, unidentified
  source 1..1278: note = MG29-123 effector
MGSIFDDFTNKYPVNKTLRFALKPIGDTEENIKKKGILLKDETRAKDYKQAKKIIDEYHKDYINRKLKDFSFDEGKLEDFADTYRNIKRDTQDENLKRQLEKLRNHLRKEVANHLKNKKLFSNQFIKDILPQWLERNSISIEGIEKPEEVIGKFQQWTTYFTGFNDNRKNIYTDKDHGTSIGYRLIHENLPKFVDNIERYDKAKSLNVDFSDVERSLVDKLPTGKLENFFTLENFNRCLTQKGIDNYNLIVGGRSENDGTKKQGINEIINLHAQQLKTGEAKKVRSCQLEQLYKQILSDRNTSSFRFENIETDSQLCGEIIDVVNTIDNVKENFTRVFYTLENADPKHIYIKSNKGITDISQNIFRDWGLVTRCLEHYVEAKIYPVSDGKKETKTLQTRREKWLKQPFFSIDDIHTALESYFAQYKNEDLQNGTSAEGEIEIAEQKAIAINKPLFDYFKKCTIRKNNENDNRFESKNLFEEVQRTRKEALKVLEEFQDIEDQKLKNDKEKVQHIKNYLDALLGLQYFLKPLHFQLRKSEEKNANAYEKDGSFYTKFDGLYEVVQQIQPLYNKARNYLTKKPYSEEKYKLNFENQTLADGWDKSRETSNSCVLLLKNGRYYLAVMDKEHKRLFEGDIPEHKDCYKKMVCKLLPGPNKMLPKVFFSDRRGELFDPPEEILHIRNVASHVKNGDPQPGYIKQEFNLDHMHKMIDFFKTSIEKYEKWRNFGFQFSSTKSYENISSFYKEVSDQGYKIAFQNVSKDYIDECVKKGHLYLFEIYSKDFSDKSKGKPNLQTLYWKALFDEKNLRNVVYKLDGKAELFHRKASIHYKDEIWEKGHHADDPKKKQPYPIIKDRRYARDTYHFHVPITCNFKAENSGNFNEEVTRHLKNNDEVRIIGIDRGERHLAYYTVIDQRGKIIEQCSLNNLNGKDYHDILDKRENARDKARKSWGTIEKIKDLKEGYLSQVVNNIAKLMIEHNAIVVFEDLNFGFKRGRFKIEKQVYQNLEKRLIDKLNYLVFKDKKPHKNGGTFKALQLTARFESFQKLGKQTGFIFYVPAYHTSKICPATGFVNLLYPKYETIKKAQELFGNFDKICYNKDEDYFEFHLDYGKFTDKAEGGRRKWVICTHGTRLENFRDENNQWDTREVDLVEEMKKLFQNNTIDFKNGECLIQKIKTKDGADFFRSLIKLLRLTLQMRNSRIGKEEDWLISPVKDNGVFFDSRKADPSMPQDADANGAYHIALKGLLMLKQLKGAGSVTDFKPDLSNKAWYEFVQEKPRL

SEQ ID NO: 6447 - protein, 1284 aa, unidentified
  source 1..1284: note = MG29-124 effector
MENSKSIWNSFTNEYSLSKTLRFELKPVGRTLELIKENKLIEEDKEREKEFNRVKEIMDEYYKYFIDICLSDIEISGLKKHVEIYYKLKKANYKDEKLKSEYKESQHKITKEIYDQINKDDALNKRLGEEFIRQILPKWLETNGRIEDKKLVLKFQKWTTYFINFFSNRKNVFSKDEIPTSIIYRIVHDNLPKFLDDIAKFEELKNLKGFDYTKIEKDFSNELNDKSLEMFFSVNNFKNCINQSGIERFNLIIGGKSESNNIKIKGLNEYINEFSQKEKDNEKKIRQLKLVPLFKQILSDRNSPSFILEQINDKKEMLDKIEEFYTSFNNNLNKLKNSIKNLKKFDSEKIYLKNDESLNSISKNMFGYWGKIQEGLKLYFESKLKNKKDIEKAQNSEYFSISDIDEGIKILQLESEYPVIEYFLKFSEDYQSSNSSDKNLLSQISSKYDILKDKIKEIRENDTNKISEDDVVKIKDFLDSILSLCRFLKPLYLYSDKDKSEELELLDIDPDFYNEFNPVFQELERIVPLYNQIRNYITKKSFSTKKFKLNFDNSTLAVGWDLNKEKSNYAVLLRKKNTVTEQYDYYLGIMIKNFNKIFDNGKKSTNDQNSYEKMIYKLIPGPSKMIPKVVFSKANKDSLNPSKEILKIYNESSFTKNGSAQGGYKKKNFDIENLHKMIDFYKFCLKNYEGWSTFDFRFKSTNEYSDISEFYKDIESQGYKISWKYYDEAYINEIVDNGKLYLFQIWNKDFSEYSKGKPNLHTIYWKSLFSEENLRDIIYKLNGGAELFYREKSIPRSITHEKNKPIKNKNPFDGKEESTFEYDLIKDKRYTEDKFFFHCPITLNFVKNYQKRMISKSVNKFIHDEKDGINVLGIDRGERNLAYYSLINSNREIIEQGSFNVIFDDKKRKLDYRDKLDEIEGKRDEARKNWKNIANIKEMKEGYLSQVIHRISKLAIEHNAIITLEDLNFGFKRGRFRFEKQVYQKFEKILIDKLNYLIFKDTTEKEAGSILKAYQLTDKFESFQKLGKQSGIIFYVNASYTSKICPKTGFVNMLNPKFENVNKSKEFFAKFKYIKYNRAEDLFEFNFNYSDFTDKNEIKLKKDNWSVWSNGIRLKTRKDNNGNYWKTEEIDVTAELKKLFKDNKIDYNSEINLTGSISNYNNQRFHKDLIDLLKLILQLRNSYTSYEVEEFKKKYGDKFNMRDYDYILSCVKDNKGEFFDSRKSKNNEIKDADANGAYHIALKGLMVIKKIKESDNTDKTDLRINKNDFINYIIDSYGGKHNNI

SEQ ID NO: 6448 - protein, 726 aa, unidentified
  source 1..726: note = MG29-125 effector
NYVTQKPYETSKVKLNFENAQLLNGWDKNKEADNTSILLRKDGLYYLAIMNKKNNKVFEKAPKSIIGDVSFEKVNYKLLPGANKMLPRVFFSNTNIDFFNPSEEILRIRNTATHSKNGEPQKGFEKADFNLKDCHTLIDFFKDSLTIHKDWKHFGFQFSVTSTYQDISGFYREVENQGYKITFDNIPTSYINEKVEHGELFLFQIYNKDFSPFSKGTPNMHTLYWKMLFDEQNLKDVVYKLNGQAEVFFRKSSIQPKNIITHPKNQPIDAKNPLKPNKNTFAYDLIKDRRYTIDKFQFHVPITMNFKANGTDRVNEKVNTFLKNNPDVNIIGLDRGERHLIYLTLVNQKGEIIKQESLNNIKDEKHNITTPYHTLLDNKEKERAEARQEWGTIEGIKTLKEGYISQVVHKIATMMLEHNAIVVMEDLNFGFKRGRFHVEKQVYQKLEKMLIDKLNYLVVKSADKNKPGGVMNALQLTSKFESFQKMGKQTGFMYYVPAWNTSKIDPATGFVDFLKPKYESVSKAQDFIANFNAICFNKNKEQFEFSFDYNNFHNKAEGTQTLWTLCANNHTRYWYNRTLNLNKGGQEAIKVCQVLELLFADNNITYGNGADIRDQIMAQSSTDFFKKLLKCMSVTLSLRHNNGLKGDAEQDFILSPVSNDKGEFFNSLTAPATEPQDADANGAYHIALKGLWVLQQLSQTVDLSKPKLAISNKEWLNFVQKREFIK

SEQ ID NO: 6449 - protein, 1082 aa, unidentified
  source 1..1082: note = MG29-126 effector
SRFEKIKEFNLDLKTLENDFKDVLDNRDLNEFFSINNFNNFLNQSGIDKFNLVIGGKSLEDNKKIKGLNEYINEFSQKESDKAKRKNIRKLKFAVLFKQILSDSESSSFVIEKFKDKKEIFETIDMFYEKFNKYSSKIKESIKKLNDCDSKNVYIKNDTNLTQVSKGLFNDWNKIDIGLRHHFENELKIKKLTDKQREKELDKFMKSKYFSLDEIEKGINSLELKDKKSIIDYFLNFSKSKNDSKVDLFENIKSKYSEFNKINRNKTIKLTEKSSENDVELIKTFLDAIMELYHFIKPLLLNFKKNEDKKGSNVLETDSDFYNYFNEIFDKLGEIIPLYNKVRNYVTQKPFSTKKFKLNFENSTLAAGWDINKETANTTIILKKGTDFYLGIIDKNNTKIFLNQQNSNSSVVYEKLCYKLVSGANKMLPKVFLSEKGVKTFKPSKEILNLYKNEEHKKGNTFSIESCHKLIDYFKECIPRYKPNPNDKYGWDVFKFKFSDTKTYKDISDFYREVENQGYKIWFENIDESYLNKLVDEGKLYLFQIWNKDFSKYSKGKPNLHTMYWKELFSEENLKDVIYKLNGEAELFYREASIKRQITHPKNISIDNKNPIKNKEKSTFNYDLIKNKRYSEDSFMFHCPITLNFKAKDQSKSIHKLVNKFIHDTDKKINIVGIDRGERNLAYYTLVNSDGNIIEQESFNIISDDLQRKFDYQEKLDQIEGDRDKARKNWKKIANIKEMKTGYLSQVIHKISKLVIEHDAIIVLEDLNYGFKRGRFKIEKQIYQKFEKMLVDKLNYLVFKGIDKNLPGGNLNAYQLTNKFESFQKLGKQSGIIYYVDAYKTSKICPRTGFVNLLYPKFENIIKSQEFIKKFKSIKYHKEEDLFEFNFNYSDFKKDQKEKLEQDNWSIWSNGTKLINLRDKENNNQWTTKEYDVTEKLKELFNKYKIEYNSEDYLLNEIVKIKDKSFYESFIYILKVILQLRNSYSDFEVKQFKKKLGDKFKESDYDYILSCVKDKKGNFFDSRHAKTDEVKDADANGAFHIALKGLMVIDKIKKLNDVDEKTKIDLKIPRNDFLNYVVKRNT

SEQ ID NO: 6450 - protein, 842 aa, unidentified
  source 1..842: note = MG29-127 effector
QTVQEALSQCSIEAVKEKNKQNAIVNYFADMGLNEEIKMNLFDKVIADYKNVKDLLNTSYPENKKLGNQKGKDSDIEKIKTFLDSVMNVIHFIKPLNLKDESKEKDETFYSLFLPLFDQLNKTILLYNQVRNYVTKKPYSTEKIKLNFENSTLLDGWDVNKEQDNTSVILRKDGLYYLAIMDKSNKKIFLNAPKADDKKDSFKKMNYKLLPLVNQQLPRVFFAKSRIEYFNPSSKIVQNYKNNTHKKGDTFNINDCHALIDFFKASLEKHEDWKHFNFKFSPTKTYQDLSGFYREVEQQGYKMTFENIPTDYINEMIEEGKLYLFQIYNKDFSPYSKGKPNMHTIYWKMLFDEQNLKDVVFKLNGQAEVFFREKSIKDNIIVHKSNNSIENKNPDNPKKQSKFNYDIIKDKRYTIDKFQFHVPITLNFKATGRDYINEDVNRFLKNNKEVNIIGIDRGERHLAYYMIINQKGEILEQTSFNIISSKHKENKYSTNYHALLEKKEMARDKARKSWDTIGTIKELKEGYISQVVHKIAQLMVKHNAIVVLEYLNPGFKDSRKKVEKQVYQKLEKMLIDKLNYLVFKDYEANTTGGVLKALQLANKFTSFDRLGKQSGFLFYVQAALTSKIDPATGFVNFLYPKYESIKKAKKFLDKFDKIIYNNSKNYFEFAFDYNNFTTKAEGTRTKWVVCTHGDTRYRYNPQTKTSEEVNITQEIKYLLIKHNIQYENGNCFKNKLIQAEDKKFYSKLLHLLAITVSLRHAKSGTDIDFILSPVADKNGVFFDSRKANDTMPKDADANGAYHIALKGLLALNKISNTPDDKLNKVDLKITNKEWLAFAQKKN

SEQ ID NO: 6451 - protein, 901 aa, unidentified
  source 1..901: note = MG29-128 effector
MIDDLTNQYSLQKTLRFELKPIGKTLKYIEERGLIEEDYKRSQEYKRLKEIIDLYHKDFISEALDSVVFDDLEEYERLFFQNRDERDEKSFAKIQENIRKVIRKAFESHPNWKHLFKKELLNKVLPYWEHDNITDSDREIIKNFQKFTTYLNGFHKNRENIYSSEAKHTAVAYRVVHENLPVFLQNKRLFETIGQNYPEIIEAAKEELDTQERLMGATVEAVFNLDYYQYLMSQKHIDIYNTILGGFTLDDGTKIQGLNEKINKFRQDNKLSKRELPNMKPLYKQILSDREALSWLPDSFENIQDMSEAIASFYNKNILHFKCCDGEVNLLEKLDEVFEESNEYDLDKIYIRNDKSLTDISQAIFGDFGVIKDALWDYHLSKNPKLEKKKNIDDIQAKYFKKSYFSVKQIEEALKFYGKEESLIEYFKGFGAYKNSEKRDLREEIKSAYSNWSSDRENKDKIKELLQALLNLQHFLKVLYVKDELEKDIAFYAYFDIYFEALSLVIPLFNKVRNYLTKKPYSTEKFKLNFQNSTLLYGWDVNKESANLGILFEKEGLYYLGIMDKKHNKIFQDIKESNSSNVYRKIEYKLLPGPNKMLPKVFFSKRRIDEFAPSEELIAKYKEGTHKKGEKFNLEDCHNLIDFFKNSIKKHPDWKEFNFNFSPTREYQDISEFYKEVELQGYKLTFKNIDTEIVEQFIEEGKLYLFQIYNKDFSPYSKGVPNLHTIYWRMVFDENNLKDIIYKLNGDAEVFYRKHSIEYNEKIWKEGHHVKELAGKFDYPIIKDRRFALDKFQFHVPITLNFKAPNITAKEHNNLIRQKIKENADSIKIIGIDRGERHLLYLSLIDSSGKILEQYSLNEIVNSYNGKEHRVDYHKKLDKIEQERKSARLNWEAVEGIKELK

SEQ ID NO: 6452 - protein, 736 aa, unidentified
  source 1..736: note = MG29-129 effector
MSAQSALSTLINKYSLSKTLRFELIPIGKTKESIDRKGLLSQDVKRAQSYKEVKKIIDEYHKEFIEKSLINAKLKGLEEFSKLYYKLQKEDKDKKNIKKMQDNLREQISDLFKNNKKDKWNILFKEDLIKKELPLFAKDDKQKNLINEFNKFTTYFTGFHKNRKNMYAEEEKSTSIPYRIIHQNLPKFLDNIRIFEKIKKNKINTDVIEKELSLFLNGIKINDIFSINFFNDVLNQKGITFYNTILGGVSEKDRTKIKGINEYVNTEYNQKQLDKKSKIPKLKQLYKQILSDTETASFVLEQFENDNQLLEKIEQFYNTELINYETEGKTQSVFLQFEQLFKNMQNYDASKIYISNLSIANISKIIFGDWSIICNALAEWYDKHNTKGKKINEYKKENFLKQDFSIQQIEDAVLEYKNDTLNKEINFLLNYFASFLNEKSKKNIIQRIETEYSKVKDLLNTDYPEKKKLASDKDNVSKIKAFLDSLMDFLHFVKPFNIKKDTGLEKEENFYSIYVPLFEQIDKIIPLYNKVRNYLTKKPYSTEKIKLNFENSTLLDGWDLNKESDNTSVVLRKDDLYYLGIMDKKHNRIFKELPSQNGNESSYEKMIYKLLPGPNKMLPKVFFSKKGKKQFKPSKKLLKKYEDGTHLKGDNFNINDCHNLIDFFKESIAEHEDWKQFDFKFSSTSSYKDLSNFYKEVEKQGYKITFQNISENYINQLIDEGKLYLFQIYNIDVQNK

SEQ ID NO: 6453 - protein, 1279 aa, unidentified
  source 1..1279: note = MG29-130 effector
MKNFTNKYSLSKTLRFELIPQGKTSEHIENKGLINQDEKRAENYKRIKSIIDDYHKDFIRQAMSNVQLTKLEIFADLYNAYNEKKKEESFKKEFEKVQSDLRKEIVAGFSSDNVKEIFSEIFGEKLIKELLEDWMRKQDCYSDEHYELLKDFKTFTTYFTGFNDNRKNIYTSEAHSTAIAYRLIHENLPKFIDNIKAYKKVKESRININKLEENLDSLLPGVVLDQVFSLDYFKYVLTQTGIDNYNLVIGELNLVGNLFNQKQEIKNNRIPKLKPLYKQILSDRQSTSFSLEAFEDDSNSTASQQVLDTINTYYRNSLICFYPTENSEPENVLEEIKKLLEDLKTYDLDKIYLRNDAKITAISKKIFGDYSVFGSALNYYYKTVENPKFEEEYKKAKSQKAKENLENKQEKFVDKPYIAISLLQKALDIYIESLDDNHKLKDKYKPNCVADYFHTYFISEQNSNGKKFDFVSNINAKHSCIQGLLNDAYPLDKKLHQEKDDIAKLKLFLDALMEMLHFVKPLALAKDSNLPKNDSFYGQFTTWFEQLDLLIPLYNKVRNYATQKPYSVKKIKLNFENSYFLSGWATEYSSKGGLVIIKENDFYLAIVDKKLSDDDVAFLTENSNLNLAQRVVVDFQKPDNKNIPRLFIRSKGENYSPAVEKYNLPIGEVIDIYDSGKFKTEYRKTNPQDFKQSLVKLIDYFKEGFTKHESYKHYQFLWKDSKEYLDISEFYKDVESSCYQLSFENINFDNLLNLVDQEKFYLFKIYNKDFSKHNKGKPNLHTIYWKALFDEQNLANVFYKLNGQAEIFYRRKSIKEPTIHKAGEAIANKNPNNQKKESIFDYDLIKDRRYTVDKFQFHTPITLNFKAKGGDYINYDVLSYIKNNPDIKIIGIDRGERHLIYISLIDQKGKILKQESFNIISNDGHETSYHNLLATKEKERADARENWGVIENIKELKEGYISQVVHKIAKMMVENNAIVVMEDLNFGFKRGRFKVEKQVYQKLEKKLIDKLNYLVFKDKQPNEIGGLYNALQLTNKFESFQKLGKQSGFLFYVPAWNTSKIDPTTGFVNLFYAKYESVEKAQEFFGKFEDIRFNPSHNYFEFEVKKYSDFNIKAEGTRQDWLICTYGDRISTFRNSQKNNSWDNKEVILTDEFISLFEKYAIDYKSENLKNLIISQTDKSFFESLLRNFKLTLQMRNSITNSEVDYLISPVQNNKGEFYDSRKADETLPKNADANGAYNIAKKGLQCLEQINKFEGENWKKLELDKANNSWLRFAQNKN

SEQ ID NO: 6454 - protein, 1028 aa, unidentified
  source 1..1028: note = MG29-131 effector
MKNQHLFSGFTNQYAISKTLRFELKPVGRTLEHIEKKGLITQDNQRAEDYKEVKILIDEYHKNFIEKSLDGFALNGLQEYYDLFIKTNLEEIDKKALDKEKDNLRKQIANRFKKHDKFKSLFAKELIKEDLIGFVSEENKELVNKFKNFTTYFTGFHENRKNMYVADDKATAIAYRLIHENLPKFIGNIIIFEKIKKDAPDLVSQLNNVLSEMEEIIQGKTLEEIFSLDYFNETLIQTGIDLYNIVLGGRSEDGKDKIKGLNEYINLYNQKQTEKKNRQPKLKQLYKQILSDRDSVSFIAEEFKEDTEVLEAIEKFYQGELCNYESDGQAINVFNVSKKNLIGNLSSFDLSKVYLRNDRAITYISQQMFSDRSIVGNALQEYYRAQNPQKGKEKTENFEKRIDKWVKKSDYFDIQTVQEALSQCSIEAVKEKNKQNAIVNYFADMGLNEEIKMNLFDKVIADYKNVKDLLNTSYPENKKLGNQKGKDSDIEKIKTFLDSVMNIIHFIKPLNLKDESKEKDETFYSLFLPLFDQLNKTILLYNQVRNYVTKKPYSTEKIKLNFENSTLLDGWDVNKEQDNTSVILRKDGLYYLAIMDKSNKKIFLNAPKADDKKDSFKKMNYKLLPLVNQQLPRVFFAKSRIEYFNPSSKIVQNYKNNTHKKGDTFNINDCHALIDFFKASLEKHEDWKHFNFKFSPTKTYQDLSGFYREVEQQGYKMTFENIPTDYINEMIEEGKLYLFQIYNKDFSPYSKGKPNMHTIYWKMLFDEQNLKDVVFKLNGQAEVFFSEKSIKDNIIVHKSNNSIENKNPDNPKKQSKFNYDIIKDKRYTIDKFQFHVPITLNFKATGRDYINEDVNRFLKNNKEVNIIGIDRGERHLAYYMIINQKGEILEQTSFNIISSKHKENKYSTNYHALLEKKEMARDKARKSWDTIGTIKELKEGYISQVVHKIAQLMVKHNAIVVLEYLNPGFKDSRKKVEKQVYQKLEKMLIDKLNYLVFKDYEANTTGGVLKALQLANKFTSFDRLGKQS

SEQ ID NO: 6455 - protein, 1035 aa, unidentified
  source 1..1035: note = MG29-132 effector
NCIAYQKITQKYSDEGFTAELVKCEQFFTPENYGICLTQGGIDVYNQLIGKKSDDTYGKGINQQINEFRQKNSLKRNDVPLMTVLFKQLMSESERTFAIETIESDEELFSVVKDAYNTCINLVDGLSSLCLSNLTDDNYSSILIRSDGLSNLSQKIFGRWDIIDSALNLHKESIGQKNFDAKYSKVISLFDLQTICDTYTSTLDDSVITRNITFLDYYKSFDSSLINNAYLETESVLNSGGLDKDKTMPEKDTDFGGKGYQQLQKIKQLLDAVNDAVHFYRPFLLEKEGKAIEADENNKEFYNEFLLYYRDLSCFPKVYDKVRNYATKKPYSKDKFLLNFDKPTLLDGWDVNKEESNLAVMLFKGGKYYLGIMINNRLFSDYSTIGTVSKNEQAYEKLVYKQVSGACKMFPKVFFANSNRELYKPSSAIEKIRNEKSHLKGGSENSKNKWIQFCIDCIDKQPEWKTYFKFNFKKPEEYPDVNSFYKDADAQMYSISFAKIPCEYVDKAVTNGELFLFELYNKDFSEHSKGRPNLHTLYWKMLFDESNLNNIMNNPDKGIFKLNGEAEIFYRKASLPDKPTHPANKPITNKNPLNRKMQSTFEYDIKKDRRYMSDKFMFHCPLTINFRKEKVGQGQFNTKVNTAIEQNLEDVNIIGIDRGERHLLYYTMINSKGNIIKQGSLNSMTADCGVTTDYRSKLNDKEKSRTAGRENWGQIETIKELKQGYLSQVVHTLSQMMIENNAVIVLEDLNTGFKNGRKKVEKQVYQNFEKALIDKLNYLVFKEKAVGEKGSCLEGYQLTAPFESFTNLGKQSGFLYYVIPAYTSKICPKTGFVDFLKPKYESVEKSVELFEQFDKICFNAEADYFEFSFDFKKTGVDKGGKTKWTVCTFGKERYVYQGTDKEPKCIDVTEELKNLFSFYNIALADKKDLLPQILTVKEKNFWSSLIYTLRATLQMRYTKPGTEDANDYILSPVMDENGVFFDSRNAVENEPKNADANGAYHIAVKGQKLIASITAGRTTDSGKLNEWLEYVQKRG

SEQ ID NO: 6456 - protein, 1281 aa, unidentified
  source 1..1281: note = MG29-133 effector
METNFFKSFTKQYSLSKTLRFELKPIGKTIANIETKGLLAQDNQRAESYKKVKKTIDEYHKYFIELALKAVKLTKLDEYYELYSKNKEDRDDAAFKKVKEDLRKEIVAVFTKGGFKEMFIRLFSKELIKEDIAAWISEHPKFAEDLKFVKEFDNFTTYFTGFNENRKNIYSAEDKSTAIAFRIVHENLPKFIENIKLFKTIKEKHANLDFSPILKEMEEVIQGVTLDEIFTLDYFNHVLSQNGIEFINFIIGGKTLKNGDKIKGLNEYINLYNQQQKDKNKRAPKFKQLYKQILSDRTSISMRFEEFENDSDLLETVEVFYQSELCEYETEGKTHNIFEEIKTLCESIGTYNLEKIYLRNDSNLTNISQRLFGSFSVFRDSISFYYDTVVDTNFQTKYANAKTENQIKHLNDTKNKWNSDFISLGLLQKTLAKYIETLDADSEIRKIYTPTIITDYFKRHIIKKEVEEAKNNETIKKTTDVELFYSITGQYLGVKGLLNIEKTDNKTLAQEKEKVHQLKSFLDSILELNHFVKPLFLTDDSISDKDDAFYSQFAPLYEQLNKLIPLYNMVRNYLTQKLYCTDKIKLNFENSTLLDGWDVNKEPDNTSVILRKDGLYYLVIMDKAGKKVFMDVPKIAYSGTFYEKMNYKLLPLVNQQLPRVFFAKSRIEFFKPSEAIQENYKKETHKKGDTFNIKDCHALIDFFKASLAKHEDWKHFNFKFSPTKSYQDLSGFYREVEHQGYKMSFENIPTDYIDKMIEEGKIYLFQIYNKDFSAFSKGLPNMHTLYWKALFDENNLADVVYKLNGQAEVFFRKSSIEEKNKVIHKAHELLKSKNPNTPNNNNTFDYDLIKDRRYTVDKFQFHVPININFKASGSEIINAQTNDFLKNNRDVKIIGLDRGERNLIYLTLIDQKGNIIIQESLNTISNKERKIETPYHTLLNIKEKERDAARKSWNTIENIKELKEGYISQVVHKIAEMMVKHHAIVVMEDLNFGFKRGRFKVEKQVYQKLEKMLIDKLNYLVFKDAQPTQPGGLLNALQLTNKFESFKKMGKQSGFLYYVPAWNTSKIDPATGFVDFLKPKYENVEKAKAFFSKFDSIKYNTVKDYFEFAFDYKNFTTKAEGSKTDWIVCTHGDLRFRYNAQTKESEAVNVSQEIKKALKKHEITFEQGKDFKNLLIAKGGKEIFSALLHLLALTLSLRQTKSGSEIDFILSPVTNRKGVFFDTRNADEKMPIDADANGAYHIALKGLWCLQQISQSDDMKKVKLAISNKEWLEFVQNLCWH

SEQ ID NO: 6457 - protein, 1307 aa, unidentified
  source 1..1307: note = MG29-134 effector
MNFNNFTHQYSLSKTLRFELKPIGETADYIEDFKSQYLKDIVTQDQQRAEDYKVLKEIIDDYHRHYIEEKLSEPFDKKTGELFISEEDFENAFSYYQRFKEDPKDEKSKKDWLDTQSSLRKSVVKIFSDRKKRLFQKELITKELPAWLKEKGEWEEKKNVVENFNRFTTYFTGFNENRENMYSDEEKSTAISFRLMNENLPKFLNNCLQFGVIIEKHIDLDLKIESKLLQKMGVSNLNEVFQPSYFIQLFTQTGIDNYSELLGGWTKENGEKIQGLNELINLHRQKYSIKAKGLPNFIGLYKQILSDRESSSFIPDQFENDKALLESLKIFVKEMAKTDGIFVNLKKAVTLLKEADLDKTFIKGGVEISKISQAIFGQYSIIRSAIYNYAETVMYPTPKTGKVSDVLEEKRKKYANNEDIFSIAELESMLTSYREQLEDEHPDKEIITHCENSEHPIRTYFLNIIDNVKNDKDIELGKSIENVLPLLSLENLNKGKAGQTQTHLIQKMLDAFLAVTHAVKPLHLVKGRKPIEVPDIDMGFYADFSSAFEIYQQMIIGLYNKTRNHLTKKPFSTDKIKINFENPTLLDGWDANKENDNSGILFKKDGNYFLGIMHPKHKNIFNYIKGINDIESEKRSLSKDELFDKIVDGNSDHYQKIVYKLLPGVNKMLPKVFFSGRRIDYFAPSTEVLKIRNTASHSKNGKPQKGFEKADFNLKDCHTIIDFFKQSLEKHPEWKEFEFDFSPTSSYEDLSGFYREVEHQGYKMDFHPIKKSYIDQCIEDGKLFLFQIYNKDFSPYSKGKPNLHTLYWKALFDPENLKNVVAKLNGQAEIFYRKHSIIKDDRTIHRSNKSLQNKNENNPKKTSLFEYDIIKDKRYTVDKFQFHVPITLNFKAEGVTRFNDKINRELSKSDDTHIIGIDRGERHLLYYSVINHKGEIVEQETLNTISTDQGFAVDYQQKLDKKEKARDKARKSWSTVENIKELKAGYLSHVVHKLALLIVKYDAIICLEDLNFGFKRGRFKVEKQVYQKFEKALIDKLNYLVFKDAKPNEPGHVLNALQLTAPFDSFKKLGKQTGILYYVQAAYTSKIDPVTGFINFLYPKYESLIKSKTFFESMEGIRYNPNKDYFEFSFDYRKMTPNRDLKGYQTKWTACTFGEKRFKNIRNANGNWESVEVNVTEALKEILKNEDVDFNSNQDLRLAISKVKSTKFYKKLFKLLQITLSLRHSKMGTDEDFILSPVADENEEFFDSRDATENQPKDADANGAYHIALKGLWNFEQIRNWDGESRLNLAMKNVEWFAYAFQKPFIK

SEQ ID NO: 6458 - protein, 1260 aa, unidentified
  source 1..1260: note = MG29-135 effector
MKNFTNIYPQSKTLKFELRPQGATLDNIHKSGLIDQDETLKADYQAVKKMIDEYHKVVIDESLTNFKLTGLPAYEELYYKDRTEAEDKTFEKIQSNLRKQVHKAFGENKRYKSIFKKELIQKDLPDFVNKEEEREQISRFYHFTTYFTGFHENRKNIYTAEAKATSVCNRLIHENLPKFLDNRKTYLNYISNFGDLDMSQAEEDLQEVLGGIKVGELFSLDFFNHTLTQQDIDIYNIALGGRSVEGGKKIQGINECINLYRQNNQLKARQLPNIKPLYKQILSESESGSFLLDKFEKDEDLFDGLRNFYQGLNSFNYKGEQDKSTFIELMNLFGRFSESDMTRVYLRNDASLSRLSKKLFGDWSLIVSALRYYYDAEVNPLMGKKATNKYIKEKENWLNKSRDFSIDIINKSLLRYGTINETVNSQFTDDIIFEHFSSFMIEEKNLLNTVAENFMLVSEVLSRGSLDKDQNKKKKEIKTIKTFLDNVLDLLHFIKPLSVQHVGAEKDEGFYSDFDVLYDQLSQVIPLYSKTRYYLTKKPYSVAKFKMNFKNNTLLDGWDVNKETANKGVLLQKEGLFYLAIMNKDHSKSFYNIMDTGDTTGYQKMDYKLLPGPNKMLPKVFFSVKNLGFFNPSEKVLRIRNTSSHSKNGNPQEGFDKADFSLNDCHSLIDFFKASLDKHADWKKFAFDFSPTQSYNDISEFYREVENQGYKITYTNISDEYIHELVNEGKIYLFQIYNKDFSPFSKGKPNLHTLYWRALFDEKNLEDVVYKLNGQAEVFYRKKSIEYSEEKWIQGHHYDQLKDRFAYPIIKDKRFAFDKFQFHVPITMNFKASGSPVINMKVREYLKTNPDVKIIGLDRGERHLLYLTLIDQNGNIEEQYSLNEIVNSYNGKVHKKDYQQLLHEKEGDRKKARENWETIETIKELKEGYLSHVVHKIVNMMVEHNAIVVMEDLNFGFKRGRFHVEKQIYQKFEKMLIDKLNYLVLKDTQDPKAPTGLLNALQLSTKFESFQKLGKQSGFVFYLPAYLTSKIDPATGFVNQLRIKYDSVVKSQAYYRQFDRIVYNTTTDWFEFGFRYVNFGNTTPSVRQEPWTICTTHHPRYAWNKNSNMGKGGTEEYNITEELKKLFDHHNIAYEEGTDLIESIASNTGTDFFKRLNKLLNVTASLRHNNGKKGKEERDFILSPVANSEGAFFNSLEADETQPENADANGAYHIALKGLWALQSIRKTDTDRMAKLNLVVSNEEWLNFAQAKQYRSQSSS

SEQ ID NO: 6459 - protein, 1323 aa, unidentified
  source 1..1323: note = MG29-136 effector
MFQAFTNQYPVLKTLRFELKPINETTGYLEDFKSAYLKKVVGQDEKRASDYQAIKKIIDNYHRHYIDQCLVAPCDEKTGELFITPEQMEDAFSYFQAYREKPDEKGGKEGWMKTQKTLRANLVKAFKDNGSLFKEDLIKRLLPEWLQQQGTWEECREAVESFSKFTTYFTGFHENRKNIYSSEDHSSAISNRLMNENLPRFFNNCIQYTQLREKYPELGLNAPANILQALNASTLDKVFQPGFYLNLFTQRQISHYQELLGGKTTDTGEKQQGLNEQINLFRQKTGLRPRELPGFTPLYKQILSDVESHSFVPEAFASDRQLLDALAAFIMQMDEKMPALMEQLDGLEQADQTKTHIKAQSLGTVSQALFHSWGIIGVALARHAESLFPANAKGVVTKAIEEQREKYGKQETYPLAEVDQVLTGYISTLEQDDPLHQQLKALSTPDKPLLAYFRQAAIQTQVSISPLKKQLAELLILPELSKDRQLPKDDQETGGQGFQQVQRIKALLDAYKALVDVFKPLHLVKGRKAMEIPDLDNGFYSMFEETYATCEQPVVALYNKTRNYLSQKPFSADKIKLNFEDLTTTLLNGWDVNKETANGNILLEKDGLYYLGILHPKHKRLFDYVKDIDDFGNAKMEQKKDVLRTSLEAESGELGYRKIVYKLLPGANKMLPKVFFSASRIGFFQPSSDIQRIRDTASHSKNGTPQPGHKKADFSLSDCHAMIDFFKASIEKHPEWREFGFQFSPTHTYVDMSGFYREVEQQGYRIDFHRIKASYIDECVKDGKLFLFQIYNKDFSPHSKGAPNLHTLYWKGLFDPENLKDVVIKLNGEAEIFYRKHSIRQHDRIIHRAGQPVANKSGGNPKRHSLFEYDLIKDRRYTQDKFQFHVPITLNFKAAGVNAFNDRINTTLAGQQGTHVIGIDRGERHLLYYTVINPRGEIVEQGTLNTVEVNVPTTAERAGYQYGVDYQKMLDAKESERDKARTSWAGIENIKELKEGYLSHIVHKLAKLITRYNAIVCLENLNAGFKRGRFKVEKQVYQKFEKALIEKLNYLVFKDAKPGEAGHFLRAYQLTAPFEGFNKLYQQTGILYYVRADYTSKIDPATGFIDFLRPNYESVEKSAAFFRQFDAIRYNVAKDYFEFSFDYKKFQTRQRLESYPTRWTACTHGDTRYHNKRDKNGQWHTETINVTEQIKALLQQENIGFEQGQDIREAIAGSKDSPFFKSLLFLLRLTLSLRHSRTGTDDDFILSPVANELEEFFDSRKAGQNLPKDADANGAYHIALKGLWNLQQIRQHDWSVAKPQPLKLNLSNEEWFGFVQGKPYLKG

SEQ ID NO: 6460 - protein, 910 aa, unidentified
  source 1..910: note = MG29-137 effector
RLFGSFSVFRDSISFYYDTVVDTNFQTKYANAKTENQIKHLNDTKNKWNSDFISLGLLQKTLAKYIETLDADSEIRKIYTPTIITDYFKRHIIKKEVEEAKNNETIKKTTDVELFYSITGQYLGVKGLLNIEKTDNKTLAQEKEKVHQLKSFLDSILELNHFVKPLFLTDDSILDKDDAFYSQFAPLYEQLNKLIPLYNMVRNYLTQKLYCTDKIKLNFENSTLLDGWDVNKEPDNTSVILRKDGLYYLVIMDKAGKKVFMDVPKIAYSGTFYEKMNYKLLPLVNQQLPRVFFAKSRIEFFKPSEAIQENYKKETHKKGDTFNIKDCHALIDFFKASLAKHEDWKHFNFKFSPTKSYQDLSGFYREVEHQGYKMSFENIPTDYIDKMIEEGKIYLFQIYNKDFSAFSKGLPNMHTLYWKALFDENNLADVVYKLNGQAEVFFRKSSIEEKNKVIHKAHELLKSKNPNTPNNNNTFDYDLIKDRRYTVDKFQFHVPININFKASGSEIINAQTNDFLKNNRDVKIIGLDRGERNLIYLTLIDQKGNIIIQESLNTISNKERKIETPYHTLLNIKEKERDAARKSWNTIENIKELKEGYISQVVHKIAEMMVKHHAIVVMEDLNFGFKRGRFKVEKQVYQKLEKMLIDKLNYLVFKDAQPTQPGGLLNALQLTNKFESFKKMGKQSGFLYYVPAWNTSKIDPATGFVDFLKPKYENVEKAKAFFSKFDSIKYNTVKDYFEFAFDYKNFTTKAEGSKTDWIVCTHGDLRFRYNAQTKESEAVNVSQEIKKALKKHEITFEQGKDFKNLLIAKGGKEIFSALLHLLALTLSLRQTKSGSEIDFILSPVTNRKGVFFDTRNADEKMPIDADANGAYHIALKGLWCLKQISQSDDMKKVKLAISNKEWLEFVQNLC

SEQ ID NO: 6461 - protein, 931 aa, unidentified
  source 1..931: note = MG29-138 effector
AETIEIARGLFSEVINLTAIHALADNSENIYINSSALANLSHRFCDDWNLIYRACEAKMIKLSGKQKKGLENKLKMAIPMSELQNIIEEYIATLDEELKLSYNNIPVLCDYFQNPPLDDFESATLKFEQIVKTTMSRTDLIQAIKEVLDKAMEVVRFFKPLYLFKGRSPLEVPDRNEDFYNEFERLYAELNLISKIYDRVRNYATKKQFSQDKIKLNFNNPTLLDGWDLNKEQDNLCVILIRDGNYYLALMNRDYRRLFDLKNDEVRNKALGKAGDHCYSKLEYKQVTGASKMLPKVLFAATNSDLFKPSQEILDIRKAGSHKKEAGNIEALHKWIDFCKQSIATHPEWNDHFDFKFRSTSEYSELTEFYNDFDRQAYKIKFVDIKVEYIDQLVKEGKLYLFQIYNKDFSPYSKGRPNLHTTYWRMLFGNENLANITMDPDRPIFKLNGEAEIFFRKASLEKQITHAKGQPITNKSKKDNGKESESIFEYDLIKDKRYTEDKLFFHCPITINFRAPGTTVGSFNRKVNYFVERNPEVKIIGIDRGERHLLYYTVIDQKGNILEQGSLNQIHNSYTSAGRVVEHNINYRDLLHEKEKGREEARKNWETIENIKELKAGYLSQIVNLLSNLMIKYNAVLVLEDLNAGFKRSRIKVEKQVYQKFEKAMIDKLNYLVFKELPPGSSGHYLNGYQLTAPFTSFRDLGRQSGFLYYVYPSYTSHICPKTGFVNLLNTRYESIEKAISFFEKFNSIKYNPGSDYFEFDFDYASFGKDVARSQWCVCTAGEKRYYYANHDKTSRECNATQQIKELLDKYNIEYIRGKDLLPEIIKMNDKGFLNGLMFLLGVVLQMRYTVSGTSNDDDFILSPVMDEQGQFFDSRSAATSEPQNADANGAYHIALKGLKMISSISDGKLKTVNKNERQDWFAYVQNKMYR

SEQ ID NO: 6462 - protein, 1249 aa, unidentified
  source 1..1249: note = MG29-139 effector
MQTIFNDFQGLYSLSKTLRFELKPVGKTKELLEDFYNHCQDNPIAVDEQRIGHYPKMKDLIDDYYRFFIDKILSPTIYSAEEMQNAYELYCAAKSDNKNNQKDYLAAKKILRKKLAKCFTDQKTIYGLNEYSKLFGQEQMPLNLWLKCRLDNHQITEAEYQENMATIKAFERFTTYFTGFKENRENLFVEDDKASAIANRVIEENMEKHFFNCRTLTAMVEKQPQLAKELAEFLPLFTPEHYCKCINQQGIDSYNQAIGRKIDCEGEKGVNQILNEYKQNSNLRAKDLPMLTTLFKQLLSKKSDCLFNETITTDQEMLQLTQYCYNKAKKQLNELQKIMADYLTDENLQHIYLKKASLNALSHRFLGEWDTVRNAYLNHYQQLTKKEQNAFDKQTKEVIGLDLLQTIISNYLPNLESAPSVSQLAIYLGSIDLEPLNKAYAEAASVLALEKLDDDKRLPENINDEGGLGYQQIMLVKCLLDKIIDAKDFYKPFLLEQGHKPLKVDNNNELFYAQFVSAFYELDSLCQKYNFIRNYATKKATSTDKFKLNFSKPTLLNGWDLNKEEANSNVLLRKNDKYFVGILINKKLFADPAKYICEDEAEHYQKMLYKQVSGVNKMFPKVFFAAKNQNIYKPSAQILQIKEAKSHLKEANNPSAKNAWIDFCKDSIKKSEWPQYFNFKFKPANEYPDVNSFYQEADAQMYSLAFQNVAADYVTQAVENDELYLFEIYNKDFSACSKGKPNLHTMYWQMLFDEQNLQNIADSAEKPVFKLNGEAEIFYRKASLVDTVTHPAGVPIANKNPLSSKMTSTFTYDIKKDRRYMQNKLYFHCPITINFRKNTMPQTVFNYKVNTFLQDNPNVNIIGIDRGERHLLYYSLINQKGQILKQGSFNTITAAGNTTDYHNLLDKKEHQRTQARQDWATIERIKDLKSGYLSHVIHELATLMIDNNAVVVLESLNKGFKTGRQKIEKQVYQKFEKALIDKLNYLVFKDSAPNQAGHCLSGYQLTAPFESFDKLYNQSGFLYYVVPAYTSKICPKTGFVNLFNSSYTNYQSVNASVEFLKKFETIKYNTQADYFEFRLDYKNFFEAKGKTTWTICTHGQERYHYNPKDKKYKCIDVTQQLKELFTNYGIDYQSENDLRQEICAQTEKSFFSGLLFYLKLTLQLRHTNGGTDDINDFILSPVADSNGCFFDSRQAQLTEPKNADANGAYHIALKGLKLLKGLDEGRTPSTKNEKAQWLEFTQQHQYLEA

SEQ ID NO: 6463 - protein, 1308 aa, unidentified
  source 1..1308: note = MG29-140 effector
MLFKKFTNQYPLSKTLRFELKPVGETADYIEDFKSQYLKDIVAQDEQRAEDYEIIKEIIDNYHQHYIEEKLSEPIDKKTGELFISGEDFENAFSYYQCFKENPKDEKSKKNWGDTQTSLRKNLVKSFYDRKKQLFQKELITKELPAWLKEKGEWEEKKHVVENFNRFTTYFTGFNENRKNMYSAEEQSTAISFRLMNENLPKFFNNCIQFGVIIEKHIDLDLKIESKLLQKMGVSNLDEVFQPSYFIKLLTQTGIDNYSELLGGWTKENGEKIQGLNEIINLYRQKNAIKAKYLPNFISLYKQILSDRETSSFIPDQFESDKDLLQSLSVFINEMAKEDGLFKKLEESITLLNECDLHKTFIKNGIEITNISQSIFRNYSILKSAIFHHAETTIYPTPSNGKISEALKEKRKKYVNKQNVFSIAELEVMLSVYYNQLDDDNPIRETFKNGITSNNLLQSYFLGAINAVKNAKDTCLTEKMEKVLPLLSLDRLSKGEKGEEQIRHIQAMLDAFLAVSHVVKPLHLVKGRKPIDVPDVDMGFYTDFSTSFEAYDQTVIMLYNKTRNHLTQKPFSKDKIKINFENPTLLDGWDTNKEKDNSGVLFEKDGNYYLGIMHPRHKKIFDYNKGINDLESVKRSQTKDKLFDKIVDCSQNHYNKIVYKLLPGASKMLPKVFFSKGRIEFFSPSNDVIRIRNTASHTKNGKPQEGFKKAVFNLNDCHTIIDFFKTSIEKHPEWKEFGFDFSPTSSYEDLSGLYREVEHQGYKMDFHPIKESYINQCIEDGKLFLFQIYNKDFSQYSKGKPNLHTLYWKALFDPENLKDVVAKLNGQAEIFYRKHSIKKDERTIHFANESLKNKNENNPKKTSSFEYDIIKDKRYTVDKFQFHVPITLNFKAEGVSRFNDKINHELAKSNQTHVIGIDRGERHLLYYSVINPKGQIVEQGTLNTISTDQGYEVDYQQKLDEKEKARDKARKSWTTVENIKELKAGYLSHVVHKLALLIVKYNAIVCLEDLNFGFKRGRFKVEKQVYQKFEKALIDKLNYLVFKDAKPNEAGHVINALQLTAPFDSFKKLGKQTGILYYVQASYTSKIDPVTGFVNFLNPKYESLLKSKIFFESMDGIRYNTDKDYFEFLFDYRKMTPNRELKGYQTQWTICTHGNKRFKNIRNEYGKWESVEVNVTEELITLLTNEGIEFQSGKDLKNAITTAKRTKFYKSLFKLLQLTLSLRHSKTGTDEDFILSPVANEAGQFFDSRNATEIQPKDADGNGAYHIALKGLWNLQQIKAWDGESKLKLAMKNVDWFTFAQKKPYLKN

SEQ ID NO: 6464 - protein, 1309 aa, unidentified
  source 1..1309: note = MG29-141 effector
MKLNKFTHQYPISKTLRFELKPVGETADYIEDFKSQYLKDIVIQDQQRAEDYESIKVIIDEYHRHYIEEKLSEPFDKKTGELFISGDEFENAFSYYQRFRENSKDEKARKEWIEVQNSLRKSLVKVFSDRKKRLFQKELITKELPSWLKEKGEWEDKKNVVENFNRFTTYFTGFNENRENMYSHEEQSTAISFRLMNENLPKYFNNCIQYHKAIESYDGLSFTVNPDLLNEMGVSILSEIFQPSYYIQLFTQSGIDKFTELLGGFTKENGEKVQGLNETINLFRQQKAIKAKAFPNFISLYKQILSDRETSSFIPDQFENDNDLLKSLGKFIKEMVKEDGLFKKLEDSIKLITDADLHRTFIKNGVEITKISQSIFGNYSILKSAIYHHAESVLYPDPISGKISEALKEKRIKYVNKQVVFSIAELETILSNYASQMTDDNPDKEIIAQCENSEHPIRTYFLNAIENVKNDKDIEFGKAIENVLPLISLENLNKGKDGQAQTHKIQKMLDAFLAVTHAVKPLHLVKGRKPIDIPDMDMGFYAEFSKAFENFEQLVITLYNKTRNHLTKKTFSTDKIKINFENPTLLDGWDANKEKDNSGVLFEKDGNYYLGIMHPKHKNIFNYIKGINDIESEKRSLSKDELFNKIVDGESEHYQKIVYKLLPGVNKMLPKVFFSGRRIDFFAPSTEVLKIRNSASHSKNGSPQKGFEKEDFNLKDCHTIIDFFKKSIEKHPEWKEFEFEFSPTSSYEDLSGFYREVEHQGYKMDFHPIKKSYIDQCIEEGKLFLFQIYNKDFSPYSKGKPNLHTLYWKALFDTENLKDVVAKLNGQAEIFYRKHSIKKDERTIHRANKSLQNKNENNPKKTSLFEYDIIKDRRYTVDKFQFHVPITLNFKMEKMTQFAHNEKVNQMIVKSENTHVIGIDRGERHLLYYSVINPKGHIVEQGTLNTISTDKGYEVDYQQKLDSKEKARDTARKSWTTVENIKELKAGYLSHVIHKIAFLIEKYNAIVCLEDLNFGFKRGRFKVEKQVYQKFEKALIDKLNYLVFKDAKPNEPGHVLNAFQLTAPFDSFKKLGKQTGLLYYVQASYTSKIDPVSGFINFLYPKYESLLKSKIFFESMDGIRYNADKDYFEFSFDYRKMTPNRNLEGYQTKWTACTFGEKRFKNIRNAHGNWESVEVNVTEALKKILKNEDVDFKSGHDLRFEISKVKSTKFYKKLFKLLQITLSLRHSKTGTDEDFILSPIVDENGKFFDSRNATKAQPMDADGNGAYHIALKGLWNLEQIRNWDGESRLNLAMKNVDWFSFAYQKPFKK

SEQ ID NO: 6465 - protein, 1309 aa, unidentified
  source 1..1309: note = MG29-142 effector
MKLNKFTHQYPISKTLRFELKPVGETADYIEDFKSQYLKDIVIQDQQRAEDYESIKVIIDEYHRHYIEEKLSEPFDKKTGELFISGDEFENAFSYYQRFRENSKDEKARKEWIEVQNSLRKSLVKVFSDRKKRLFQKELITKELPSWLKEKGEWEDKKNVVENFNRFTTYFTGFNENRENMYSHEEQSTAISFRLMNENLPKYFNNCIQYHKAIESYDGLSFTVNPDLLNEMGVSILSEIFQPSYYIQLFTQSGIDKFTELLGGFTKENGEKVQGLNETINLFRQQKAIKAKAFPNFISLYKQILSDRETSSFIPDQFENDNELLKSLGKFIKEMVKEDGLFKKLEDSIKLITDADLHRTFIKNGVEITKISQSIFGNYSILKSAIYHHAESVLYPDPISGKISEALKEKRIKYVNKQVVFSIAELETILSNYASQMTDDNPDKEIIAQCENSEHPIRTYFLNAIENVKNDKDIEFGKAIENVLPLISLENLNKGKDGQAQTHKIQKMLDAFLAVTHAVKPLHLVKGRKPIDIPDMDMGFYAEFSKAFENFEQLVITLYNKTRNHLTKKTFSTDKIKINFENPTLLDGWDANKEKDNSGVLFEKDGNYYLGIMHPKHKNIFNYIKGINDIESEKRSLSKDELFNKIVDGESEHYQKIVYKLLPGVNKMLPKVFFSGRRIDFFAPSTEVLKIRNSASHSKNGSPQKGFEKEDFNLKDCHTIIDFFKKSIEKHPEWKEFEFEFSPTSSYEDLSGFYREVEHQGYKMDFHPIKKSYIDQCIEEGKLFLFQIYNKDFSPYSKGKPNLHTLYWKALFDTENLKDVVAKLNGQAEIFYRKHSIKKDERTIHRANKSLQNKNENNPKKTSLFEYDIIKDRRYTVDKFQFHVPITLNFKMEKMTQFAHNEKVNQMIVKSENTHVIGIDRGERHLLYYSVINPKGHIVEQGTLNTISTDKGYEVDYQQKLDSKEKARDTARKSWTTVENIKELKAGYLSHVIHKIAFLIEKYNAIVCLEDLNFGFKRGRFKVEKQVYQKFEKALIDKLNYLVFKDAKPNEPGHVLNAFQLTAPFDSFKKLGKQTGLLYYVQASYTSKIDPVSGFINFLYPKYESLLKSKIFFESMDGIRYNADKDYFEFSFDYRKMTPNRNLEGYQTKWTACTFGEKRFKNIRNAHGNWESVEVNVTEALKKILKNEDVDFKSGHDLRFEISKVKSTKFYKKLFKLLQITLSLRHSKTGTDEDFILSPIVDENGKFFDSRNATKDQPMDADGNGAYHIALKGLWNLEQIRNWDGESRLNLAMKNVDWFSFAYQKPFKK

SEQ ID NO: 6466 - protein, 1475 aa, unidentified
  source 1..1475: note = MG29-143 effector
MIYNVKLKKLTNSSDVFSLFSRKYSLSKTLKFELKPTAETKQHLQDFIVSDTKRAKEYKELKKIIDEFHKDYIELTLSHKNILDKDKLTDFCKLWSDNNLLDEIKEKHNLKEKTKEEVIKKMEQQFRKDIVEQFKTLNPLLERFFKTADEEQLLGFLKKLDNKLWTKFKEKKEKALLDEYLQEPIKQKNIEKSILFSSELIKYLLPVWLKNSQLTDKEDKQKIIKNFGRFTTYLTGFNENRKNMYSVEEQGTAIAHRIINENLMKFLGNLQAYEKIKSSHPELQQSFKNMKSDFKEEFDYFSLENIEDLFKPEFFNSCLSQKEIDFYNTLLGGKTVEDGKKLQGINEYINLYRQKKKSEDIDIKIKYSNKNLPTMELLYKQILSDRESHSFILAEFENKKELLEALKSFWSVLFEEKTYQDYFHTKKKTSLWNNLHSLLTGRSYYDLEGAYFKSSELNKLSHNLFKDYRIITEALNENYDKIKVTLESYKKVLKKEDKKEFEKNIKSLKGFQTEWKKILSFEKNKEELKFSDEILASYFEFPIDKKTKKKNQKDFYSLQEIKDHIELYSKESDELKEDLDNLKKKLKDYKKDNIISSWFKYQFESKQNLDFFLQRNHEKENEDKREQNKNSLFSHIENHYQKIQNLSLDEKEFKKEEVEDIKFFLDLILHVLHLMKPFYLEGKASNLLDKGINNEIEVLYKKLKPIEKLYNQTRNYIAKKKSRYNKVKINFEDSTLLDGWDLNKEKDNLAVLLRKKDAVIGWKYYLGVMNKTTKDLFDYHIKLDDSEKVKQKKEELQDLILHRENDGNFYEKMNYKLLPDPSKMLPKVFFSKKNLDSFKPSEEIVRIRDNKTYAKNGGQDFSKADCHKFIDFYKESLKKHKEWNDFFKFNFSPTSQYNDISDFFQEVKNQGYNLQFDKIKSSYIEEKVKTGELFLFEIYSKDFSTKSKNRKNSKDNLHTIYFKGLFEKENLKDTVLKLNGKAEIFYRKATKKFNITHKKNTELENKNKNNPNKHSIFNYDLIKDKRFTEDKFFFHFPISLNFNSKGMKSYLFNQEVLKCLKGNKEVNIIGIDRGERHLAYYTIINQKREVLSQGSFNKMESSYKDNSGKEVKIEKDYHELLESKEKERDKSRKEWNKIENIKELKSGYLSYLVHKISKLMIEHKAIVIFEDLNLGFKRGRFKFEKQVYQKLEKALIDKLNYLVFKDKKSSELGGYLNAYQLTAPFESFQRMGKQTGYLFYVPAYYTSKVCPLTGFINLIYPKYKNVKESQQFFEKFDRIYFDKNKNYFVFEYQDKKVNPSKKTESIETLWKVCTHGEERYKWDVKDRKMIEVNVTENLKKLFEEHKIEYRQIADLKSTITKQEKKDFFSKLIDGLKITLQLRHINPDSKDEKEKDFILSPVADESGRFFDSRKAKEGEPKNADANGAYHIALKGLRTLENITSDKKDKLKLQAITNKDWFSFLKENSNKKIPKVG

SEQ ID NO: 6467 - protein, 1196 aa, unidentified
  source 1..1196: note = MG29-144 effector
MGMIGDQFIGQYSLQKTLRFELRPIGETQKLLQDFKEEVQGNLLEYDAERARAYPMVKKVLDDYYRYFIDQVLSGFAFDSQTINEVYEMYKKAKKDAEAAKEYAVHTKKLREQLSAAFKAPITYYMLDKYEHLFNRNRESRLFEWLDIRFENDHLTENEYDEIKDVLDKFDKFTTYFTGYKENRANLFVADEKATAIAYRVVNENMPRFFENCIRMENIKKRHLDLYKLLDSFEGYFVPQAYANIICQPAITDYNKIIGRPTQNPDEKGVNSIINEYRQKNQIKNRELPMMAQLYKQLLSDRITVFLDPVINNDEEMQSIVAETIEIARGLFSEVINLTAIHALADNSENIYINSSALANLSHRFCDDWNLIYRACEAKMIKLSGKQKKGLENKLKMAIPMSELQNIIEEYIATLDEELKLSYNNIPVLCDYFQNPPLDDFESATLKFEQIVKTTMSRTDLIQAIKEVLDKAMEVVRFFKPLYLFKGRSPLEVPDRNEDFYNEFERLYAELNLISKIYDRVRNYATKKQFSQDKIKLNFNNPTLLDGWDLNKEQDNLCVILIRDGNYYLALMNRDYRRLFDLKNDEVRNKALGKAGDHCYSKLEYKQVTGANKMLPKVLFAATNSDLFKPSQEILDIRKTGSHKKEAGNIEALHKWIDFCKQSIATHPEWNDHFDFKFRSTSEYSELTEFYNDFDRQAYKIKFVDIKVEYIDQLVKEGKLYLFQIYNKDFSPYSKGRPNLHTTYWRMLFGNENLANITMDTDRPIFKLNGEAEIFFRKASLEKQITHAKGQPITNKSKKDNGKESESIFEYDLIKDKRYTEDKLFFHCPITINFRAPGTTVGSFNRKVNYFVERNPEVKIIGIDRGERHLLYYTVIDQKGNILEQGSLNQIHNSYTSAGRVVEHNINYRDLLHEKEKGREEARKNWETIENIKELKAGYLSQIVNLLSNLMIKYNAVLVLEDLNAGFKRSRIKVEKQVYQKFEKAMIDKLNYLVFKELPPGSSGHYLNGYQLTAPFTSFRDLGRQSGFLYYVYPSYTSHICPKTGFVNLLNTRYESIEKAISFFEKFNSIKYNPGSDYFEFDFDYASFGKDVARSQWCVCTAGEKRYYYANHDKTSRECNATQQIKELLDKYNIEYIRGKDLLPEIIKKNDKGFFNGLMFLLGVVLQMRYTVSGTSNDDDFILSPVMDEQGQFFDS

SEQ ID NO: 6468 - protein, 1279 aa, unidentified
  source 1..1279: note = MG29-145 effector
MKEFTNKYPSQKTLRFELQPQGKTRDYIDKNGILLRDKERNESYQEMKKTIDRFHKYFIDLALSDVKLSHLSQFKDLYLSVEMSEQQKKTIDEVKTKLRKEVAAAFRTGDAKSIFSLLDKKELITKLLKEWAEKERINNFYFDENFEKFTTYFKGFHQNRQNMYSDEAKATSIAYRSIHENLPRFIDNILIFQKLLQKEEIASHLHDICIGLEGYLNVNSIPEMFEINYYNTVLTQRQIEVYNAVIGGKTFEDGVQIQGVNQYINLYNQRCDHKDRVPPLKQLYKQILSDRESLSFLPDAFEEASQVFKSINQFFENNLIQFKVNDLEPVNILENVSKLMTELAFYDLKHIYVNNTFLSDISQKIFRNYAVIKEALNYQYESKIDPFFSEKYAKAKAENSREKLEKAKKNYTEKSYISLYEIQIALNNYMLTLEEDCIEKKSFTQTCLIDYYRSVFTHNTTEGEIDIITSIYRSYEELKEISSIDYPKNTPLSQDKSSIAKIKSLLDNVMELFHCIKPFAVPEEEISDKDGHFYNNFLVYYKSIKEIIPLRHKVQSYVTQKPYSLKKFKVNFDNSYFLTTWPFSYENKGGVIIRKEDLFYLAIINCSVKDLANYKLNDCSIANSAERIIIDTQKPDNKNIPRLFIRSKGDSFAPAVTEYDLPINDIIDIYDNGKFKTEHKKLDPEEFKSSLTALIDYFKLGLSRHNSYKHYKYQWKPSDCYNDISEFYNDTVNSCYQIKTEKINFDKILELVSEGKVYLFKIYNKDFSPNSKGQPNLHTMYWRALFDENNLKNVIYKLNGGAEIFFREKSISKENEIVHYANQPIKNKNPHAIKREVILPYDVIKDKRFCIDKFQLHIPITLNFKATGKGQLNFDVLQYLKDTPQNQVKVIGIDRGERHLLYLTMIDHEGHIIMQESLNTVKSDNYPIETQYHDLLAQKEEDRNKARSNWDSIENIKELKEGYLSQVVHKLAKLIVENNAVLVMEDLNIGFKRGRFKVEKQVYQKFEKALIDKLNYLVFKDKKVEEEGGLFKALQLTEPYTDFLKYKKKQCGFLFYVQAWNTSKIDPTTGFIDMLKPKYKNIPEAQEFFRKFISIKYNSDKDYFEFHFDYRNFPRSIDSHKNDWTVCTYGKERYTWNRSLNQGKGDYEIWNVTEKIKELFNIEGIEYRSGHNLTEAIANSESKSLLSMLMKSLSVVLAMRYSSSKDNRDFILSPVANDKGVFYYSEEADQYLPKDADANGAYNIARKGLLLLDRIRSSADLKSLKLDISNKEWLMHAQK

SEQ ID NO: 6469 - protein, 918 aa, unidentified
  source 1..918: note = MG29-146 effector
AISQQLTGSWHTINDWIADVSDNKQLSQIKKQSVFSILELEQYFGIKIEGLNFYETHAKEEHKSDQSLLKFFLKQFNEKFVEIDKTWHELSQSHVLELEQLDKKRYKAEQKGFQQVALIKAFLDSCNNLNYFIKDWTLKTSKDKYEDCYNFINSILDEFSIYHLYNKVRNYIAKKPFSTEKVKVTFEKSTLLDGWDRNKETQNLGILFTRNNQYYLGIMTSESNNLFNYDKLESDSIKKAELKSKTYNSCIASSSEDSYQKINYKLLPGPNKMLPKVFFAKSNIEFYNPSDEIITIKEKKLYSKAEIEKHGIANLHKYIQFCIDSLAKHPEWSVAYGFRKDSFKPVNTYQSIDEFYKDVEDLGYKITFDNIKKSYIDEKVENGELYLFKIHNKDFSKYSKGNKNLHTLYWQGLFEKDNLKDVVIKLNGEAEIFYRPSSIKLSETTIHKKGYEIKNKNVIKDKKISKFDYDIIKDKRYTQDKFFFHCPITLNAKANSNPGKFNDKINKFLKNNKEVNIIGIDRGEKHLLYYSVVDQQGNVISQDSFNTVNGVDYLAKLKQKEISRDEARKSWTIIENVKELKSGYLSHVIHKLAELIIEHNAIVVLEDLNIGFKRGRFKVERQIYQKFEKALIDKLNYLVFKDKTNRLQAGHYLNALQLTNKFTSFQKLGKQSGILFYTTAAYTSITDPITGFVKNLYKNYASVKDSIAFWNSFESIHFNTQKDRFEFTYDTKKINSKNLNKDTKEDKEIQTKWMVCSCVIRSRYDKKSKTHELFDVNKKLKQLCEKFNIDYKNYNLKHEFSKIDKKDFHKSCLYYFNSILNLRVTDSSQASGTPENDFILSPVEPFFDSRKKYRKLPENGDANGAYNIARKGICMLNKIKQWDEQKRLDLLITKKDWQEYCQNNEIIKQQMNKMKHKA

SEQ ID NO: 6470 - protein, 744 aa, unidentified
  source 1..744: note = MG29-147 effector
MNENNSIWGNFINKYNLSKTIRFELKPVGKTIDFIKENGLIEEDKQREKDFNEVKKIMDEYYVEFIENSLKNIKLDLSDLQEYYTIYFELKKDKYNSDLKKQFKNIQKKIANNMYQQIKDVDNFNNIFDEKFVNVVLPKWLKEKGREQDEMLLSKFKKWTTYFDGFFNNRQNVLSNDLIPTSIFYRIVVDNLPIFLDNIAKYDKLKKINGFPLESIEKNFAKYLNNVSLDYFFSLENFNNLLNQEGIDLFNLILGGYVENNSKICGLNESINLYSQKPENKETSKQLKQLIMMPLYKQILTEKKSFSEKFGIIQDNQELVNLIDDIYTNNYVLNFDNLQKLIKNLNEYDLNQIYVNTLSLQKISKSIFKDLFVIRNGLKEFIKNKEHIKSDKKSEKKLEEILNQKYFSIFEIQEGVKLLKLSKEGNSFSDNFMIDYFLENINDKLFENIKNNYNQFKSINVNHLTKITSEDIQTIKTLLDSLKELFDYIKPLYVNLNIGTNTKIQEAYNLDSLFYIEFNKIYNAFSVIIPTYNKVRNYVTKKQKNVKKFKLNFNCPVLLKGWDVTKEPENHSVLFRKDGDYYLGIMPKGHTHMFSNIENIDNDGEYYEKMVYKQISDASKDIQNLFVKDNKTQRIVGRKEKEGDNKGKNVELENARKKYLPEDIQEIKKKKSYLRSSPSFNEADKNRFIDYYKERVIDYENYNMFNFKFKESEEYLDFNDFIKDVDNQGYKIEFIKINEQFIMD

SEQ ID NO: 6471 - protein, 1257 aa, unidentified
  source 1..1257: note = MG29-148 effector
MPRTESIWDGFTNQYSLSKTLRFELKPIGKTQEYIKERGLITEDKEREKNFDVVKNMMDDYYRHFIEESLVNVAINTNHLKRYQEIYNSLKKDRTNQKLQKEFSQAQGYLRKQILKGINENPNFQHLFKQEFLTKILPTWLGDKDRTEDAKRVLEFNKWSTYFTGFFDNRKNVFSEKEIPTSVIYRIVNDNLPKFLDDISRFEELKKLNGFDYSEVESNLKQELEGKCLNDVFSLDNFNNCLNQSGIDLFNLIIGGKSDEGGTHFKGLNNIINEFSQQQDNKAIRRLKLIPLFKQILSDRESFSFISEKFDNDKELMEELLDFYEKIRSIQIIDKLKDITLKLPEYDLERVYLKNDANLTQISQEIFDNWAYITSALQEYAVSVLGLKESKAKAWVQKQSYFSIYELEEAIRQKSKDAAKNPICTYLSRFDKGERNLFEKMENNSKPLFDITVSDDRKLLTRSREADMETIKAFLDSILGILHFVKPLHLEPKKKSEEGLQDAFETDPDFYLEFNAAYDALNKISPLYDKVRNYITQKPFSTKKFKLNFQNSTLLAGWDKNKERDNWSVIFRKDGLYYLGIMSSEDNKIFSKTMPNLKDCSDYFEKMNYKLLPGPNKMLPKVIFSKKNIAFFNPSKEILSIRDHASYTKGGTPQTDFDKKEFDLDDCHQMIDFYKTCLEKHPEWCEYGFRFKATDDYADISEFYNDIANQGYRIFFEKIDSDYITKLVDDGKLYLFKIWNKDFSKFSKGKKNLHTIYWEELFSEKNLSDVVYKLNGEAELFYREASLEGCITHPKNEPIQNKDPIKGKKTSTFPYNLIKDKRYSKDKFLFHCPMTLNFKAGDKNWETNKKVNEHVAKNCDDICILGIDRGERNLASYVLIDSKGKIISQSSLNVTSDDFERTRDYQNKLDTLEGSRNEARKNWKKIANIKELKEGYLSQVVHQISNIAIDNNAIIALEDLNFGFKRGRFKIEKQVYEKFEKKLIDKLNYLVFKDRLEDEIGGALHAYQLTKKFESFKVLGKQSGILYYVPASYTSKIDPATGFVNLLYPRFENIEKAKAFFKKFDSIKFNSSKDYFEFSFRYSNFIEDMEKDAIIKDDWTVCSVGNRLVNKRLEKSRGYETIEKDLTEELKSLFSKNQIEFEEGNDLIEAISSQDNAEFFKNLIYLLKCTLQLRNSRTGTNEDYILSCVKDKNGRFFDSREANDNEPKDADANGAYNIALKGLMLVERLKNSDLESKKLDLRIDRNEFLNFVMKRAL

SEQ ID NO: 6472 - protein, 867 aa, unidentified
  source 1..867: note = MG29-149 effector
MDNSSTIWDDFTNMYSLSKTLRFELRPVGQTLEHIKEKGLIEEDKEREKEFNEVKKIIDEYYKYFIEESLREVNIERNDLEEYQGSYNKLKKPEGKYDENLKKKYSEMQTKLRKKIFSKIKEHENYKHLFGKELILSVLPEWLEKNNNLEKIDKVKRFSRWATYFKGFFDNRENVFSEKDISTSIIFRIVNDNLPKFLDDISRFQKLKEFEGFSYKEVEEGFSKELEGVDLESFFSLNNFNNCLNQSGIERFNLLIGGRSNENGMRTRGLNELINEFSPQRNENGKQIRRLKLMPLFKQILSDREKSSFIPEKFMNDKEVIDSMKEFYNDLDENIFNQIRNVVTQMHDKELKQIYFRNDRNLTDISNKMFDDWETIKNGLNEFAKLELGYTEKKAEEWIKKQKYFSVYEIEEGIKKLNIESVSSEHTLCDYFSKMNVDDKDIIEEIKTKYSVVNELSIPADKSLANESDEKNIEKIKDFLDSALILLHFLKPLYVESGRKEEEKLEQALELDTDFYHDFNQIYEKAKAVIPLHNKVRNYITQKSFSTNKFKLNFQNSTLIDGWDENKIKDNFTVILRKYSNPKKSYDYFLSIMTPEDKKIFDNTARSSSVFYERMIYRQIADASKDIQNLMVINNKTVCKKGRKDDDGINRRLEEIKNEHLPEEINEIRKKKSYLKSSENFSIEDKNKFIGYYIERAKSYWGFDFDFEDPSQYADFNGFTSHLDSMGYNISFEMVDNNHINKLVNEGRLYLFQIWNKDFSEYSKGRPNLHTIYWRMLFDENNLKNVVFKLNGKAELFYREKSISRNVTHPKNKPIKNKDPLDDKKESKFEYDLIKDRRYTEDKFLFHCPITINFKSSDKSWEINNQI

SEQ ID NO: 6473 - protein, 1246 aa, unidentified
  source 1..1246: note = MG29-150 effector
METSESIWDNFINKYSLEKTLRFELKPIGNTLQTIKEKGFIKEDKKREENFNKVKEIMDDYYKDFIEKCLSGIEIENLKDHEEIYKKLKQNYKDKYLKKEYSESEKRIRKSIYEQITKKDNFDKIFKEEFLKQILPDWLEKKGKEQEKELVLSFSKWVTYFTKFFSNRKNVFSEDEIPTSIIYRIVNDNLPKFLYDKSKFEELKDMGFDYSEIEKNFKNELNGKNLEEFFSLDNFKNCINQSGIDRFNLIIGGRSEADNVKIKGLNEIINEFAQKNKNSESDIRKLKLVPLFKQILSDSESPSFILERINNKKEMFEKIQNFYSSFNDISDKLISTIKNLNKFDVNQIYLKNDSYLNEISKNIFGDYDIIKEGLKLYFDDKSKNKKESEKAQKSEFIPISYINEGIKKLELELNDNSSIVDYFSNLSEQPSNSDNNLIEAVKNKYKCLEPLKENIDNINQISEEGIVKIKNFLDSAMSLYHFLKPLYLNSNKNRSNELELLDIDLDFYNEFNKEFEELEKIVPLYNQVRNYITRKFITKKFKLNFDKSTLANGWDLNKEKDNLAVILRKRNPVTKKYDYYLGIMIKESTKIFKGIPEGRSVNKENSYEKMIYKFIPSPNKNLPRVFLSSKKGKDKFKPSNEIVKIYEEKSYIKDSEEKDKDKKKFNTKDLHKMIDFYKDCLKNYKKWSKYFNFNFKDTNEYHDISEFYTDVEQQGYKISWKYYDEEYVNNLIQEGKLLMFQIWNKDFSGYSKGKQNLHTIYWNLLFSEENINGLIKTYKLNGNAELFYREKSIEREITHSKNNPIKNKNPINEKKESVFKYDLIKDKRYTEDKFFFHCPITLNYGTKHNEPISKTVNKIIQDSQSNINILGIDRGERNLLYYSLIDLNGKIIKQGSLNTISDDKKRELDYHSKLDQIEGRRDEARKNWKDIDNIKNMKEGYLSQVIHQIAKLAVEYNAIITLEDLNFGFKTSRFKIEKQVYQKFEKMLIDKFNYLAFKDRNEKEPGGMLKAYQLTDEFKSFKNLGKQSGIIYYVNAGYTSKICPKTGFVDMLRPKFENVKKSKEFFSKFKYIKYKKDEDLFEFNFEYSKFIVDKNKNPKLKRDNWSIWSNGIKLDTKRDNNGYWRTEKINVTEELKKLFNANEIDYTSENNLIEKIKESNDKNFHFSLIYLLRLILRLRNSYIDYEVEEIRKKNENKFNIRDYDYILSCVKDNNGEFFDSRKSSGNEVLDADANGAYHIALKGLML

SEQ ID NO: 6474 - protein, 819 aa, unidentified
  source 1..819: note = MG29-151 effector
YFTGFFDNRRNVFSKDEIHTSFIYRIVHDNLPKYIDNLERYDKLKKYSDFNCKQLVNDFSSELQGEDLSKFFTLEKFNECLSQPGIERFNLIIGGKSLEGNRKIPGLNEVINLYSQNLTNEENKRAVRKLFMLPLFKQILSDRTSASFILSAIEDDAEVISIVNELYSRISKDFELFQSTFKGLTKFNTSQIYINKALLNEVSNQIYDDWSILENSLKCFAKEKLKLNTEKKIDEWLKKSVYFSLDEIKQGIEFLKSENVTWEKFIEHYNLLTYDNKPLIDAINENYNAVKGLDLKKNEKKLLTEQKEADVTKIKQFLDSVMNLYHFLKPFNMNQDFEKETIHVEVDTEFYKDFNDIYSGFAEVIPVYNKVRNYVTQKTFSTNKFKLNFKNSTLLQGWDKNKESDNWSALFQKDGNYFLGIMSEGSGNNKLFKKKVYVANNVPTYRKIVYKLLQGPNKMLPKVFFSKKNIGKYNPSENILRIRNHSTYTKNGTPQDGYTKKEFSLADCHKMIDFYKDCIKKHKEWNEEFDFKFRKTSEYTDISEFYKDVADQGYKITYEEIPDKIINEYVDTGKLYLFQIWSKDFSPFSKGRKNLHTLYWQELFSPENLRDVRFKLNGEAEVFFRRKSIDPKITHPKNKPILNRNPIREKKESNFSYDLIKNRRYTEDKFFFHCPVTLNFKSKGSDNSKSINSKINEIVKKNPDVNILSIDRGERHLLYCTLLNLKGEILKQKSFNMVFDDVQREHSYHDKLDTLEKERQAARKAWKTIHNIKELKSGYLSQVVHQISKIAIEDNAVIILEDLNFGFKKGRFKIEKQVY

SEQ ID NO: 6475 - protein, 1135 aa, unidentified
  source 1..1135: note = MG29-152 effector
MKTCQSLQIISTFIKKIKDEGIDLTEIETNFNNVDLKSIFSIEYFSKTLTQSGIDFYNELLGGKTESEGKKIKGINELVNLYNQKQNDRSKKIPFLKPLYKLPLFERTSVSFRYEPVKDDQDLLNRIHSFYYNDLRQFYDEDDGQTKDVLDELKKLLENIHNYREGLYVNGGLTLTQISQKIFGRWNYINEALSDYYDTVINPPKPDKNGRSIVRTKKEEKEKERWLKQKQFLIITIEEALSQFKQKETNEELKNKITETTLCDFFKRCGANEEGKDNLFERIEQNLKMKNEHGESVKDLLHTNSKKSLLEDKSSTLLIKNFLDVLQGDKEDITSGLLHFIKALIPREEVGLKNEDFYSQFEKYYRQLSEITPLYNKARNYLTQKPYSIEKVKLNFENSTLLDGWDRNKEKDNTCVLLRKKMNDQYFYFLGILNKKHKKIFENYPTADKEPYYEKMVYKLVANPTKDLPNLVVIDGKTSMVKGRKNHEGENKVREQKLNKYLPPVINRIRKSKTYSSNNLVKDDLTKFIQYYQERVREYFTDLNFHFKEASEYNSWADFLDEVKQQGYSINFKTISEDYINNLVNEGKLYLFKIHNKDFSENKKSKGKDNLHTLYWKMLFDERNLKDVVLQLNGKAEVFYRPKSVNYSEDIWQKGYHYDELKEKFNYPIIKDKRYAEHKFFFHVPITLNFKSVGKNNINEKVNQWLMNNPNIHIIGIDRGERHLLYVSVINQKGEIVEQCSLNEIISEYKGHSFSKNYHQLLDKREGEREKARKDWQTIENIKELKEGYLSHVIHKITQLILKYNAIVVMEDLNVGFKRGRQKVEKQVYQNFEKMLIEKLNFLAIKDKKPEEPGGVLKAFQLSNKFESFKKLGKQSGIIFYVPAGYTSSIDPLTGYVHYLTPLKLADSIEKARNFYKKFKSIRFNTVNEWFEFSFDYNDFERVRYEGKSDWVICTSNSERYVWNKALNNGKGGAEQVKVTERLEVLFGEYEIDYGSGKCIIDQIVNVNDLDKERTAKKFYSTLNFLLNTTLKLRHNNGMKGKEEQDYILSPVSPFFDSRKENAKSASEQKLPTDADANGAYHIALKGLLLMKRLKEIGVEAFEKSKNSKDGKSQWLPNDEWLVFVQNKNSVSEPV

SEQ ID NO: 6476 - protein, 718 aa, unidentified
  source 1..718: note = MG29-153 effector
MNSIFDRFTQQYPLSKTLRFELKPVGKTAKLISEFNDDFPESTIAKDEEKSKAYPFAKKILDDYYRHFISEVLSKSELDATKIKQAFICYKECQSKNATADADAKKSEYKIQKSILRKVIADFFSSEGLELSAMFKGAKKNCAIYEYGELFKEASPLFVWLQNRLVNEVITQEEFDTQTGIINKFNGFSTYFTKYKVNRENLFANEEKASSIAYRVVDENMEKFFDNCITYQKIMQKYPNEEFAAELKKCEQFFTPENFGICLTQSGIDVYNQIIGKKSDDTYGKGINQQINEFRQKNALRRNDAPLMTVLFKQLMSESERVFVIETIDSDEELFSVVKDAYNTCIALVEGLSILCDSSLTDENLSDIFIRPDGLSNLSQKVFGKWDIIDSALNMKKESIGQKKFDAKYSKVISLLDLQTMCDAYISVIDDSEIRRNCTFSDYFKTFESSLIKSAYLEAEEVLNSIGLDKDKSMPTNDTDLGGKGFRQLQKIKQLLDSINEAVHFYKPFLLEKEGKAIEAEENNKEFYNEFLLNYRDLSVFPKIYDKVRNYATKKPYSKDKFLLNFDKPTLLDGWDVNKEESNLALLFIKDGKYYLGIMKNPRLFSNLPVKGIANENEPAYEKVIYKQVSGACKMFPKVFFADLNRELYKPGSEIQRIREEKSHLKGGSEDSKNKWIQFCIDCIDKQPEWKTYFKFNFKEPQEYPDVNSFYKDADAQM

SEQ ID NO: 6477 - protein, 1276 aa, unidentified
  source 1..1276: note = MG29-154 effector
MSLAAFTNQYQLSKTLRFELIPQGRTLQHIQQKGLLSRDQQRADSYQQMKKTIDAFHKHFIDLAMQQVHLSKLAEYQDLYEASGERKKTDEYKKELEKIQAELRKEIVAGFKAEGVSEIFGKLDKKELITDLLEKWIREQNDKDIYFDAGFKNFTTYFGGFHENRKNMYTDKAQSTAIAYRLIHENLPKFLDNCRIFDSLKARPELAEKLPLLYTEIAEYLNVASIDEAFALDYFNEVLTQKQIDVYNLIIGGRTPEEGKKKVQGLNEYINLYNQQQKDKNNRIPKLKILYKQILSDRESTSFMADAFESDADVLDAINAYYHNELISFFSADSEEAIHVLHEIRSLLKHIASYDTERIHVRNDTQLTHISQKLFGSYAVLGDALSYYHDVVLAPSHQEDYQKAKTESKRGKLEKEKEKFTKQPYISLALLQKALDYYVLSLDDTHEVRKRYSTNCISDYFHIHFTAQKRADSDKEFDLIANIEAKYSCVKGVLEHYPSDRKLHQDKKTIDDIKLFLDSLMELLHFVKPLVLPPDSTLEKDNVFYGQLEPLYTQLELIIPLYNKVRNYATQKPYSTAKFKLNFENAQLLNGWDENKESDYLTSIMRKDGNYYLAIMDKQHNKVLKKAPKAEYGRGAYEKMVYKLLPGVNKMLPKVFFSKKNIDYFAPSTQLLENYKKETHKKGENFSLHDCHTLIDFFKASIEKHEDWRNFGFQFSETATYDDLSDFYREVSHQGYKVTFQPIAENYIHELVDEGKLYLFQIYNKDFSTYSKGRPNLHTLYWKALFDPDNLQDVVYKLNGQAELFYRTASIRAEDRVIHTRGQAIDNKNPLTIKQQSTFEYDLIKDKRYTVDKFQFHVPITMNFKAGGRDNINQEVLAFLKNNPHVNIIGIDRGERHLIYLTLIDQQGNILKQETLNTIVSERYPNETPYHTLLATKEKERDAARKNWGTIENIKELKEGYLSQVVHKIAKMMVEHNAIVVMEDLNFGFKRGRFKVEKQVYQKLEKMLIDKLNYLVFKDKDAHEPGGLYKALQLTSKFISFKDLGKQSGFLFYVPAWNTSKIDPTTGFVNLFDTRYESIGKAQDFFGKFDTIHFNGAKGYFEFVFDYDAFTTRAEGTRTKWTVCTYGSRIMTFRNPDANNQWDNKEIDVTQEMEDLFGTYGITYGDGSDIRGELLRQTDKGFYERLLHLFKLTLQMRNSKTGTDIDYLISPVMNARGEFYDSRRADSTQPKDADANGAYHIAKKGLWLLEQINQADDLKKVKLAVSNKEWLRFVQK

SEQ ID NO: 6478 - protein, 1202 aa, unidentified
  source 1..1202: note = MG29-155 effector
MKTFIDKFTGLYPVSKTLRFEARPVPATKEWLESDDCHVLFNDITRDEYYPVLKQLLDDYYRYYIEEALAGFRLDEDLVHSAFIFYTEKDFEKLESGLEKLRKNLVKVFDSRKDYLLGSGQLKDLIRLNFKKKKEVLDSHLVSWIKDNPQYTAKQREDFLAAIGSFEGFVTYLGDYKQTRDSLFTDEKIASSIAYRVIHENMLLYFSNIRIYERIKETYPDLYKQINKFEEFFIPESFSGILSQSQIDRYNYNCIGRPVDDIDYKGVNILINEYRQKMDISSNELPCMAVLYKQILSDRESFMPESIKNEAEAIEIARKGYDVAFDNLCNLEELFKQNIKNNNHDNIYIKCSAINDFSKIVLGDWKILGETLKNAKYKGDVISLGQLLELNSFPILEFFNDTLESVIGSLSVEKVNELKSDLDKMLSEIQKYKPFFLFKGTKPLDVPDNGISFANEFKTIYEQLTEFIGVYNRIRNFATKKPYSMDKIKLNFDNPSLLAGWDLNRESTNGSYLFLKDGKYYLGIANNESRDLFTDIRKKNVASHDTNDVYNKVEYKQISGAAKMLSKVFFADKNVELYGHLLTDRIIDIKANKLYTTAANDKAALAEWIDFLKAAIAIHPEWNNYFNFKFRDSSEYANINEFYSDVDNQAYTLTTIPVSAEYIDELVDSHKMFLFQLYNKDFSEHSKGKENLHTMYWKGIFSKENLEAINDGTMPFIKLNGEAEMFMREASIPRKITHPREVPIATKNPVYKPMDSVYHYDIIKDKRFTERKFFFHCPITLNYRAAIKGNFNVKINEFVTGNPDINIIGIDRGERNLLYYTVINQKGNILAQGSLNRIGHKYTAKNKDFTAITDYRLLLDIKEQERNNARQAWGVIKNIKDLKAGYLSQAVHEICQLMLQYNAVVILENLDIGFKRSRAKVEKQIYQKFEKAMIDKLNYLVFKDRGYHENGSFGKGLQLSAPFESFSRIGKQTGCIYYVSPSYTSQIDPKTGFVNLLGSKLKYESIAKAQDILKRFDSISYNASNEYFEFAFDYKNFGVEMEKTNWVVCTCGSRRPEYSPEEKKIKNYHVTTELKALFDSQGIEYADGKDILSAIVSVKDKSFLEGVLFHLRLALKMRYIGEAPEDDFFLSPVEFAPGNFFDTREASQNEPQTADANDAYHIALKGLMTIQSIKDGKLAKYKVGGEKAAWFKYMQSQEFRKA

SEQ ID NO: 6479 - protein, 1251 aa, unidentified
  source 1..1251: note = MG29-156 effector
MSAQSALSTLINKYSLSKTLRFELIPIGKTKESIDRKGLLSQDVKRAQSYKEVKKIIDEYHKEFIEKSLINAKLKGLEEFSKLYYKLQKEDKDKKNIKKMQDNLREQISDLFKNNKKDKWNILFKEDLIKKELPLFAKDDKQKNLINEFNKFTTYFTGFHKNRKNMYAEEEKSTSIPYRIIHQNLPKFLDNIRIFEKIKKNKINTDVIEKELSLFLNGIKINDIFSINFFNDVLNQKGITFYNTILGGVSEKDRTKIKGINEYVNTEYNQKQLDKKSKIPKLKQLYKQILSDTETASFVLEQFENDNQLLEKIEQFYNTELINYETEGKTQSVFLQFEQLFKNMQNYDASKIYISNLSIANISKIIFGDWSIICNALAEWYDKHNTKGKKINEYKKENFLKQDFSIQQIEDAVLEYKNDTLNKEINFLLNYFASFLNEKSKKNIIQRIETEYSKVKDLLNTDYPEKKKLASDKDNVSKIKAFLDSLMDFLHFVKPFNIKKDTGLEKEENFYSIYVPLFEQIDKIIPLYNKVRNYLTKKPYSTEKIKLNFENSTLLDGWDLNKESDNTSVVLRKDDLYYLGIMDKKHNRIFKELPSQNGNESSYEKMIYKLLPGPNKMLPKVFFSKKGKKQFKPSKKLLKKYEDGTHLKGDNFNINDCHNLIDFFKESIAEHEDWKQFDFKFSSTSSYKDLSNFYKEVEKQGYKITFQNISENYINQLIDEGKLYLFQIYNKDFSKYSKGTPNLHTLYWKMLFDNDNLKNIVYKLNGKAEVFYRKSSLILGDNIVHKAGEAIINKNPDNEKKHSTFDYDLIKDKRFTLDKFQFHVPITLNFKSEGRQNLNEDVRKFLKNNPDINIIGIDRGERHLLYLTLINQKGKILFQKSLNEITNEYNNKNGKSQIKSTNYHSLLDKKEKKRDEARKNWGIIENIKELKEGYMSQIVHYISKLMIEKNAILSLEDLNFGFKRGRQKVEKQVYQKFEKMMIDKLNYLVFKDKKANETGGLLNALQLTNKFESFAKLYNQSGFIFYVPAWNTSKIDPITGFVNLLKPYYENLNKSQEFFKKFNNIKYNPKQEYFEFNFDYKNFTNKAEGSKNVWEICTTNNERFMWDKTLNSGKGAQKAVDVTQELKKLFDSSKINYLNGNDIKEDIINQNSADFFRKLMKLLSVVLSLRHNNGLKGKDEKDFILSPVEPFFNSLNAKMEEPKDADANGAYNIALKGLLILKQINESEDLRKIKFNLSNKEWLKFAQSKSF

SEQ ID NO: 6480 - protein, 1199 aa, unidentified
  source 1..1199: note = MG29-157 effector
MLSNFTNQYQLSKTLRFELKPIGNTLEHIEQKGLLSQDEQRAENYTVIKEVIDTYHKAFIEESLASVVFDNLERFEELYLKSNKDEKEQKEFEKLQENLRKEIVKNFKVHPKWNNLFKKELIKEDLLAFEQITDEQKEVVKEFTNFTTYFTGFHENRANMYTDKEQHSSIAYRIVHDNLPTFVNNKKAFESILQKYPQLISDAKSSIEEELLGAVFEDMFLLQYFNHLPSQTHIDLYNTMLGGVKRDDLKIQGFNEKINLYRQANGLNKKELPNLKPLYKQILSDKDTLSWLPEAFETQEELVGAVESFYQEKILAFECCDGRVNLLEKFKEIFSQTQLYDTSKIFIKSDKPLTDISQALFKNYGLLKEALWQKHLDDNPKLQKSKKIEESEEKFFKQKYFTLSSLQEAIEFAKLSANVWNYFQENLDTYIKQIEENHTIWETDKTNTATTKSFLDSLINLQRFLKPLNVQTDSDKDIAFYSTFDSYFEALTQIVKLYDKVRNFKTKKPYSLEKFKLNFENSTLLDGWDVNKEPDNTSILLRKNNLYYLAIMDKKYNKLFCNLEKSTQSDVYEKIEYKLLPGANKMLPKVFFSNKNIDYYNPSKKLLENYKDGIHKKGDNFDIDFCHELIDFFKVSIQKHEDWKHFKFNFSPTKSYEDLSGFYREVEQQGYKISYKNIDTKLVESWVNDGKLYLFQIYNKDFSPYSKGTPNMHTLYWKALFDEQNLANVVYKLNGQAEIFYRKKSIEYTEDKLKKGHHHEELKDKFAYPIIKDRRFAFDKFQFHVPITLNFKAEGNENLNQKTIEYIKTNDIKIIGIDRGERHLLYLSLIDLNGRIVEQYSLNQIINSYNGKEHTIDYHEKLAKKEDERALAREEWGVIENIKELKEGYMSHVIHRITTLIVEHNAIVVLEDLNFGFKQGRFKVEKQVYQKFEKALIDKLNYLVDKKKTPSDLGGVLNALQLTNKFVSFEKMGKQNGFLFYVPAWNTSKIDPVTGFVNLFDTRYSSVEKAKEFFGKFKSIRYNSVKEYFEFEFDYNDFHNKALDTQTQWTICTYGERIKTFRNKDKNSQWDNETIHLTTAFKNHFGNYQGELKEYILAQDKKEFFEQLLDLFKLTLQMRNSITNSEVDYLISPVADKNGNFYDSRKADSSLPKDADANGAYNIARKGLMLVERIKESTDVKKVDFKLTNKEWLQFAQRG

SEQ ID NO: 6481 - protein, 1113 aa, unidentified
  source 1..1113: note = MG29-158 effector
METNFFKSFTKQYSLSKTLRFELKPIGKTIANIETKGLLAQDNQRAESYKKVKKTIDEYHKYFIELALKAVKLTKLDEYYELYSKNKEDRDDAAFKKVKEDLRKEIVAVFTKGGFKEMFIRLFSKELIKEDIAAWISEHPKFAEDLKFVKEFDNFTTYFTGFNENRKNIYSAEDKSTAIAFRIVHENLPKFIENIKLFKTIKEKHANLDFSPILKEMEEVIQGVTLDEIFTLDYFNHVLSQNGIEFINFIIGGKTLKNGDKIKGLNEYINLYNQQQKDKNKRAPKFKQLYKQILSDRTSISMRFEEFENDSDLLETVEVFYQSELCEYETEGKTHNIFEEIKTLCESIGTYNLEKIYLRNDSNLTNISQRLFGSFSVFRDSISFYYDTVVDTNFQTKYANAKTENQIKHLNDTKNKWNSDFISLGLLQKTLAKYIETLDADSEIRKIYTPTIITDYFKRHIIKKEVEEAKNNETIKKTTDVELFYSITGQYLGVKGLLNIEKTDNKTLAQEKEKVHQLKSFLDSILELNHFVKPLFLTDDSISDKDDAFYSQFAPLYEQLNKLIPLYNMVRNYLTQKLYCTDKIKLNFENSTLLDGWDVNKEPDNTSVILRKDGLYYLVIMDKAGKKVFMDVPKIAYSGTFYEKMNYKLLPLVNQQLPRVFFAKSRIEFFKPSEAIQENYKKETHKKGDTFNIKDCHALIDFFKASLAKHEDWKHFNFKFSPTKSYQDLSGFYREVEHQGYKMSFENIPTDYIDKMIEEGKIYLFQIYNKDFSVFSKGLPNMHTLYWKALFDENNLADVVYKLNGQAEVFFRKSSIEEKNKVIHKAHELLKSKNPNTPNNNNTFDYDLIKDRRYTVDKFQFHVPININFKASGSEIINAQTNDFLKNNRDVKIIGLDRGERNLIYLTLIDQKGNIIIQESLNTISNKERKIETPYHTLLNIKEKERDAARKSWNTIENIKELKEGYISQVVHKIAEMMVKHHAIVVMEDLNFGFKRGRFKVEKQVYQKLEKMLIDKLNYLVFKDAQPTQPGGLLNALQLTNKFESFKKMGKQSGFLYYVPAWNTSKIDPATGFVDFLKPKYENVEKAKAFFSKFDSIKYNTVKDYFEFAFDYK

SEQ ID NO: 6482 - protein, 1281 aa, unidentified
  source 1..1281: note = MG29-159 effector
MSIMVENIYKNFNNIYSVSKTLRFELKPQGNTLENIRKINLIEEDEQRFKDFQEVKKIIDKYFKYFIEKNLDGAKLEDHQIKQFVDSYDKLKKNKNDDKLKKEFISYQDELRKSLHEQIKGKGFYKYFFKKDFIKEVLVKYLQNKGENENVYLVNKFNDRTTYFTGFNKNRENIFSTKEIPTSIYYRIVNDNLPKYIENIKNYEKLKEYFKDGLDLSQLEKDFEKELNGMSLDLFFSYYNFNSFLNQKGIDKFNEIVGGKTLENGKKIQGLNEYINLYSQEKKEKSIRKLKFVPLFKQILSDRETSSFILDTFENEQDILESVDNFYNKILNEKVEKEINDLFSNLEKYDRTQLFIKKDKTITNLSQKIFGDWSIIENALKKYALNKINVKEKDLDKWYKKNKYFSIYEIEEGIELLNIVNDMDKSVYDIFVRKVNDKPKYSICGFYSLFKPEENSLFEEIKINYGEFEKLLNNGFNKEIEENTIIIKKFLDSIMNLYHFINPLYLNQKKDSEDNEPVAFEFDSEFYSDYNKIIETLSEIIPLYNKTRNFITKKNFSTSKFKLNFQNSTLLDGWDINKERDNWAVLFRKKGNYYLGIMSKGNNKVFTNVTESDSNEFFEKIEYKQISDASKDIQNLMIIDGKTVSKKGRKEKGGYNDGKNLILEELKNKYLPPEINEIRIKKSYLKSNSNFSEDDKNKFIDYYIQRLDYWNFDFNLKKSSEYVDFNEFTSHISNQGYQIKFKKISDDYINKLVDEGKLFLFQIYNKDFSKFHKGRKNMHTLYWEELFSEDNLNDVVYKLNGQAEIFFRKASLKDPVIHPKNQDIKNKDPLNNKKTSNFKYDLIKDRRYTVDKFLFHCPITMNFKAKGSSYNLNYMINEKIKENRYNFKILSIDRGERHLAYYTLINSKGEIEKQGTYNLVVDDFNRERNYHQKLDKLEGERDQARKSWKQITNIKELKEGYLSQIVHQITKLAIEENAIIVFEDLNTGFKRGRFKIEKQVYQKFEKMLIEKLNYLVFKDKNNNELGGLLKAYQLTPKFESFQKMGKQTGIIYYVNADYTSKIDFSTGFVNLLHPKYENIIKSKEFLNKFQLIKYNSKEDLFEFNFNYSDFGYPNFKKDNWSIWSNGNKIINFRNPEKNNQFDTKKFNPTDELKNLFDEFSIKYDGGENIISEILKIDDIKLFKTLTYILKIILQLRNSSNKTGDDYILSCVKDKDGKFFDSNNKNPIEPKDADANGAYHIGVKGLILMDRIKDAQDLKKVDKAIRRDDFINYIIERRWKTI

SEQ ID NO: 6483 - protein, 1289 aa, unidentified
  source 1..1289: note = MG29-160 effector
MEKNIFEDFTNLYSLSKTLRFELIPQGKTLEHIERNGLLFQDEERAKEYQNAKKIIDKYHQHFIEEVLKSVEIEKSLLEEYETLYFLMKKGEEEKILKELENIKSKIQKNISKQIEKHPRKKNLFSKELIDGGKKEEADIIEWLFSCKENNLTLFEDTEIGNVENAIEIIKQFKGWTTYFGGFHTNRENVYSDKDIPTSIIFRIVHDNLPKFLEDRDKFKQIQMNYPNLLQQKEIEENFMAELIFENKDCSTKLFSIVEVFQLENFNLFLNQSGIDKYNTLIGGKFIEGEVQKRKGINEYINLYSQQQNEKQVIKSIKKLKMVPLFKQILSDRSSNSFVLDKFSNDGQVVSAIDYYFQTLEEELEKHSFSEIIELLFSSDHFMDYDFSKLYIKNGQGLSALSQVVFGNYSVIGAALREFALNSVNPKDRVRLSKSEESKLEKLMKTSYFSLKSIQVALMMYVEGEYKFSKIVEYFCEMPKKYTQLMGQYMENRKLFENYFLSVEKKLLKTESQDVESIKALLDSCQQFLSSIDVLSLAKGNMVMEKDEHFYYFFEPFFLRIKEIIPLYNKVRNYITQKPYSVEKYKLNFENSLLAKGWDRNKEESNTALLFKKENNFYLGIMKKSSNKIFNDTEMIKNQGEGYQKVTYKLLPGANKMLPKVFFSEKSIGYYSPSEEILNIRNHSSHTKNGTPQVGYEKNEFSLTDCKKIIDFFKGSIEKHPDWKEFNFRFSETEKYQSIDEFYREVENQGYKITFNNISENYIHQLVEEGKLFLFQLYNKDFSKFSKGKPNLHTLYWKALFDDENLKDVVYKLNGEAELFYRKASLDKIITHPKNLPIINKNTKTVKKESLFEYDLIKNRRFTENKFFFHCPITMNFKSNGKNKFNDFTNEILKKNIDDIHILSIDRGERHLAYYTLLDGKGNIVKQNTFNIISNEKTTVDYHEKLEGLEVERDKARKEWKKIENIKEMKEGYLSQVIHEIAKMVVEYNAIVVFEDLNAGFKRGRFKVEKQVYQKLEKMLIEKLNYLVLKDKQPSELGGVFNAYQFTDKFTTFKDMRNQTGIIYYVRADFTSKICPVTGFVNLLYPKYETVEKSQEFFGLFDEIRYNKEKKYFEFKFSYKEFGKECPGDWILCTHGTRLENFRNSEKNSSWDTREINITQLFENILKSYGIEYENGTCLKNSIIVQKEKKFFVDLVRVLNLTLQMRNSKTGTQIDYLISPIADSCGNFFDSRNSDCRLPENADANGAYHIGIKGLMIMERIKQLSEEKKLTLGIKNSEYFEFVQRRLSE

SEQ ID NO: 6484 - protein, 966 aa, unidentified
  source 1..966: note = MG29-161 effector
RKFEDDAEMIQANRQYFEEVLGNNTLFETGETPTEAMNQLFLSIENYDLSKIFIESPLLVTSISQKIYGSYAVIPQALEYYHDNHVNPSYAAKFNKAKSDKSRETMEKAKAAWVKGIHAVSVIHQAVIAYNDVLPDDAKLTDTQPVISYYKDIQYSEKTGESQQIFDALMRRYHQAKGMLNTDYPKGSKQILNNKSSFAIVKNLLDVSKAYVNAARDLTIKKPEGLDLDPLFYERLAKTYTYLQDLHALYDTTRNYVTQKPFSTDKIKLNFDCAQLLAGWDFNVIDAKRGVFLVKNGRYYLVIIDNKHKKAMNNLPAPITNNCYDKYNMRLSKDAHMALPKKLFTKDNLKIPAIAEMERRCRDKNGGHHLRKSPDFDKDFMHQMIDTFKDIIKKDKDFDVFGFQFKPTHQYEDINEFYADFNEQALVTWYDKVDSDVIDSLVAEGKIYLFEVYSKDFSDKSTGTPNQQSLILQYLFSQDNLAKHHFKLNGEAEVFYRKASIDKDKAVVHKKGSLLENKNPARPNSKIAKFDIVKDRHYTEDKLFLHIPITLNNNAADMKSYAMNSKVLNTLKTNGGVNVIGIDRGERNLLNITVIDSAGEILHQESLNKIASGQDMVTDYHELLDKKEQSRAESRLNWQEVESIKEIKQGYLSQVVYRLSQLMLQYEAIVVLEDLNIGFKRGRFKIEKQVYQNFEKALINKLNYLVLKQLEATEVGGTAHGYQLTAPFESFQKLGKQSGWLFYVPAWNTSHIDPTTGFVNLHHFKYESVAQATDIIDKLSNIRYNPEKDYFEFAIDYNEFTFKGGDSQKYWVVCSTPYKRYVFDKKANMGRGGTKAIDINAELKALFAAHGVDYASGEDLRPQIKAKANKELLSQLLFLLKTLTAMRYTNASSYEDYILSPVANKAGEFFDSRKGDAALPLDADSNGSYHIALKGLCLLQRVYDWRGEEFKWLDLFISNNDWLKFA

SEQ ID NO: 6485 - protein, 1321 aa, unidentified
  source 1..1321: note = MG29-162 effector
MEPLDYNNFTNLYSLSKTLRFELKPIGETADYIEDFKSQNLKDFVTEDQQRAEDYKAIKELIDDYHRAYIEDKLSSPVDPKTGEMWINPQDLEYAYSHYENLKQDQKDPKNRKLWEYTQTALRKKLVKSFAGNSDLFKKELINRDLPNWLEQKGKWEEHKATIESFKKFTTYFSGFHENRKNMYSNEEQPTAIAYRLINENLPRFFNNYIQYKKMVDEYKDLKLTATPALLEKMRVESLDEIFKPRYFINLFTQTGIDNYQQLLGGKTEETGEKEQGLNEQVNLFKQQIQKQAKEHAKKSGEKATKIYDLSGFTGLYKQILSDRETTSFIPEAFDDDKRLLITLAEHIENVTKNNGLLNKLEEAIAQLASTDLQRVYIKSVGLTAISQNLFHRYQIINLALKYYAKKELSAKDCEIYLGQKAFSIAELDEKLISYIQSLEDNDPLHEQLKKLTMPQHPLQGYLLEAVKLAQTKQDNRPELNDAISEVKQLLSLDELSKNRKTPVKEGENGGVGFRQVQKIKGMLDGFMAVSDAVKPLHLVDGRNHIDMPDMDAGFYGGFSEAYNNYTEATITLYNKTRNHLTKKPFSTDKIKVNFGTPTLLNGWDVNKETDNSSILFEKDGLYYLGIMHPKHKHLFNYTKGIDDAGNDKKLKTKDTLNKKVTETDIGGYRKIVYKLLPGANKMLPKVFFSNKRIDYFSPSSEVRKIRNTASHSINGTPRPGFNKEDFSLEDCHTMIDFFKVSIKKHPEWTEFNFQFSDTNSYEDLSGFYREVESQGYRMDFHKIKESYINECIEAGKLFLFQIYNKDFSPYSKGNPNLHTLYWKGLFEAENLKDVVLKLNGEAEIFYRKHSIKRKDIITHTANEAIANKNSENPKKESTFAYDIVKDKRYTKDKFQLHVPITLNFKAQSVSRFNDHVNKALQGNSGTHIIGIDRGERHLLYYTVINDKGEIIEQNTLNSISTDQGYAVDYQQKLHTKEKQRDVARKSWGSVEDIKELKEGYLSHVVHKLAELIIKYNAIICLEDLNFGFKRGRFHVEKQVYQKFEKALIVKLNYLVFKQNEATKPGGYLNAYQLTAPFISFDKLGKQSGILFYVQAAYTSKIDPATGFINFLYTQYQSLAKSKQFFEAFESINFNSNKNYFEFSFDYNNFNVRQNLKDYQTKWIACTHGDVRYSNKRNQQGQWETISINVTEQLKALFNEASISYQNGQDLKQALASAKNTRFYKSLYWLIKLTLSLRHSVTGTDEDFILSPIADKNGVFFDSRNATKQQPKDADANGAYNIALKGLWNLQQIKQWDGEENLKLAMKNEDWFKFINDWHNK

SEQ ID NO: 6486 - protein, 826 aa, unidentified
  source 1..826: note = MG29-163 effector
TAEAERGEAADPLKPLLVLDQLNKKRIPPEGDGEEGSEGFEQVRRIHECLDAHMSLQQVLRPLHLVLGRKPIDVASKDLGFYARFDEAIEDYNAMTIALYNKTRNHLTKKSFSTDKVKINFESPTLLAGWDLNKETANKSIILRQNGKYYLGIMHPRHPKIFSKPPEAKVGDEAYEKVNYKLLTGANKMLPKVFFSKKGLETHNPSEQILALYKNGEHKKGDTFNIESCHKLIDFFKSRIPLYKRDPSDPYGWEIFDFKFSPTKTYKDLSGFYREVEEQGYKLWFTHVTKAYIDEQIEQGHLFLFEIYNKDFSPFSKGKPNLHTLYWKGLFEQNNLDDVVLKLNGEAEIFYRKHSIAANEQIVHSANKAIVNKNENNPKPESTFEYDLVKDRRYTKDKFFFHVPITLNHKAQKPVRFNDQVNRALQKADDVHVIGIDRGERHLLYYTVVNQKGEIIEQDTLNTISTDQDYVVDYHHKLDQQERTRDKARKAWTNIDNIKELKAGYLSHVVHKLAELIVKHNAVVCLEDLNFGFKRGRFKVEKQVYQKFERALIEKLNYLVFKDTTEGQPGHYLKAYQLTAPFESFKLLGKQSGILFYVGASYTSKIDPATGFINFLKPHYESLAKSKTFFESMDSICFNAKRGYFEFSFDYANFSVPQTLDDYQTAWTVCTHGETRYHNQRNDKGIWETKAVNVTEKLKVLLNEAGVSYQNGEELKDAIAAVKSSKFYRSLYFLLRLTLSLRHSVTGTEEDFILSPVADEGGNFYDSRNASDAEPKDADANGAYHIALKGLWNLEKIDQWDGESRLNLAMKNVEWFQFASEKPFKE

SEQ ID NO: 6487 - protein, 724 aa, unidentified
  source 1..724: note = MG29-164 effector
MVAYFKKHDTFKILDKKELIQKELDKWIKKYHPDLYFDKDFYNFTTYFTGYNENRMNMYSEEEKATAVSHRLIDENLPKFIDNIRAFQLVKDSPVAENFAVICADMEPWVNVTALEDLFTLQSYNHTLTQAQIEAYNVIIGGRSEESGKVKGLNEYINLYNQKNPDRKLPKFKMLYKQILSDRSSASWLPENFDKADEMLDAVNRFYADYTDHMIGVLQQALRTLPECDLERIYIRNDGAITDISNRLFGYYGVLKDALGIDPEDKKKQEYYSIVQVQTALDAYIAESDAESNPQLFAAYSTDCIAGYFADGICRESSDICAKIEDSYQKAKDLLNTAHSGEYQLAQAEKDSLKAFLDSLMSLLHFVKPLYLKPGVELPKDDVFYGTFTPVFEQMQPLTKLYDKVRNFVTKKPYSTEKVKLNFDCSTLLNGWDVNKETQNLGVLLLKDGKYYLGIMDKANNKAFSEAESSEETDCYQKVMYKLLPGPNKMLPKVFFSRSRIDEFAPSEEVLRIREKETFKKGPSFSLADCHTLIDFYKASIEKHPDWSQFNFHFSPTEQYEDISEFYREISEQGYKLTFKPISTSYIDSLVNDGKLYLFQIYNKDFSPYAKGKPNLHTLYWKALFDEKNLSDVVYKLNGEAEMFYRKASIAEKSKIVHQANLPIEKKNPNLKGQYSTFAYDITKDHRYTVDKFQFHVPITMNFKAGASPRINESVCAYLKNNPD

SEQ ID NO: 6488 - protein, 919 aa, unidentified
  source 1..919: note = MG29-165 effector
MFDIFTKQYQLSKTLRFELKPIGKTKDYIEQKGLLSQDEERAEDYKRVKKIIDDYHKDFIHKSLSGVKLEALEEFEKLYFLPSKDDKTQKEFKKLQESLRKQIASAFRVHPTFKNLFAKELIKDELTSFVTDESDRALIEKFKNFTTYFTGFHKNRANIYTHEPKHSAVVYRIVHENLPIFLSNKKAFESVRRDYPQLLEQTQSSLLEHLEGGIVEYMFSLEYFSFTLAQKYIDLYNTMLGGKTLEDGTKIQGFNEKINLYRQANGIDKRKLPNFKALNKQILSDRESLSWLPEAFKTKEERTEAVRVFYAEHIAKFQCCDGVVDLLERIPELFTAKNMYEPSKIFVKNDLSLTAISQSLFSDYRTIREALWQKHLSQNPKAQKSKDLAGDEERFFNRKNSFFSVAEIEAALSEYASEKSMFDYFYKGAEQAASEIKAAYASWVNNPNDTKTTKKLLDAILSMQRHLKPLYVKTDTDKDIAFYAMFDTYFESLNGISKLYDKVRNFETKKPYSLEKFKLNFENSTLLDGWDVNKEPDNTAILFLKDGLYYLGIMDKKHNRVLKNIQPTTKEGGYKKVEYKLLPGANKMLPKVFFSNSRIGEFAPSAQLLENYKNDTHKKGDKFSLADCHALIDFFKASIQKHEDWKHFGFNFSPTSSYEDLSGFYREVEQQGYKIAYKNIEAEYIDTLVDEGKLYLFQIYNKDFSPYSKGTPNMHTLYWRALFDEQNLADVVYKLNGQAEIFYRKKSLDYSEEKLKVGHHPELKTFAYPIIKDRRFAFDKFQFHVPITLNFKATGGDNINALVNGFVAKNSESIKIIGIDRGERHLLYVSLIDAKGCMVEQYSLNQIINSYNGKEHIIDYHDKLTKREDERAKARVEWGNVENIKELKEGYVAKNSESIKIIGIDRGERHLLYVSLIDA

SEQ ID NO: 6489 - protein, 1264 aa, unidentified
  source 1..1264: note = MG29-166 effector
MQNDLVWDDLVNKYSLSKTLRFELKPVGKTLDFIKESKLIEEDKQREADFNDVKKIMDDYYKDFIERVLNSVIIEPSDLEYFRLVYENLKKDKYNVDLQKKYFNIQKKLREQIYDQIKTNPDFTNLFKKELISELLPSWLKENEKLDQLENVLKFSGWTTYFTGFFENRKNVFSEKDIPTSIIYRVINDNLPKYIDNLSKIDKILALNDFDYSEIETKYSVELSNKKLIDFFSLNNFNCFLNQKGIDIYNLIIGGKSVENKKIQGLNELIYLHSQKAENKEIQKSIKHLKLIPLFKQILSDRVSFSDKYEQLNNNKEVIENIGVFYNLLIKEEIFNKLKNIINSIDQSDFSQIYIKNDSNLTTISQGLFKDYSKIKLGLREYAITEKNLKTDKKIDLFLKQKYFSIAEIEQGLKLIGLNKSISEYFKSFKLDDKEIFSEITDAYDKFKSIEYDPNGDRFDIGEETEKGDLIKQFLDSIMDLLHFIKPLYVSLKNKTIDDEDEKKSEAYELDASFYSEFNEIYEKLSELIKIYNQTRNYITKKPFVTKKFKLNFNCSSFLTGWGTGFTTNSAIIFRKSDNDKFFYYLGIVPQNLSFEDKEKLFLVSNCENVIKWVYYDFQKPDNKNIPRLFIRSKGDSFAPAVEKYNLPIEDILEIYDNGYFKTEYKKTNFVKFKNSLIKLIDYFKLGFENHESYKHFNFKWKESKEYNDISEFYLDVIGTCYNLKFIDVNFNNLIELVENKKIYLFQIYNKDYSKYSKGKKNLHTIYWEELFSKENLKNVVYKLNGEAELFYREKSLPVKITHPKNQNIDNKDPINNKKTSCFDYDLIKDKRYTEDKFLFHCPITLNFKKKDIKTINNEVNKIIKSSEVNILSIDRGERNLLYYTLLDSNGNILLQNSFNSVFDDLNRKSDYKDKLDSIEGERKAARKNWHKIINIKELKEGYLSQVIYKISKIAVENNAVIVLEDLNYGFKKGRFKIEKQVYQKFEKMLIDKLNYLVFKEKDPEEIGGSLKAYQLTSKFDSFKKLGKQSGIIFYVPASYTSKICPKTGFINFIYPKFENIKQAQDLLSKFKYIKFHLNEDVFEFNFNYSDFKSKNDKTKLIKDNWSIWSNGVKLVQFRNSEKNNMWDTKEVNVTEELKKLFDNQRINYKDINNLKDQIVNVDSKEFLEKLIANLKLILQLRNSRSNSDEDYILSCVKGKDGKFFDSRSAKDNEPKDADANGAYHIGLKGLMIIDKIKEQESDKKIDLKIQNNDFINERIKRCN

SEQ ID NO: 6490 - protein, 1314 aa, unidentified
  source 1..1314: note = MG29-167 effector
MEKFSIKYQLSKTLRFELIPQGKTLEHIQNKGLLTQDEQRAESYKKMKKTIDGFHKHFIELAMQNVCLTKLEAFRDLYFAPTEKKKNDAFKKDLEKVQETLRKEIAKGFQTGAAKDIFSKIDKKELITELLENWIQTQQKEDIYFDENFKNFTTYFGGFHENRKNMYSDKEQSTAIAYRLIHENLPKFLDNIRTFERIKAIPDLHEKCSVLYKEIEEYLNGITIDEVFELNYFNEVLTQKQIDVYNLVIGGRSPKEGIKKIQGLNEYINRYNQQQQDKNQRIPKLKILYKQILSDRESTSFVAEKFENSQEVLEAINGFYHHKLISFQPEGKEDTENVLTELQEILASLKEYDLSKIYIRNDKSLTDISQALFGDWSILKNALEFAYLQTIEIGKKGLSKKQETEKEKYLKQSYFSIAEIEKALFAYRNEVELLNNLKENDLPITNYFKTHFKTKKENDTDKEFDFISNITAKHSCIKGILENYPEDKALHQDKTAIDNIKLFLDTMMELLHFVKPLILPKDSTLEKDDVFYGQLNVWYEQLNELISLYNKVRNYATQKPYSTKKIKLNFENATLLDGWDVNKEEANTAVLFKKGNLFYLGIMDKNHNKIFREFPKNKSRNNYSKINYKLLPGASKMLPKVFFSEKNIAYYAPSEEILNIRNRSSHTKGGKPQEGFGKADFNILDCRKMIDFFKSSIDKHQDWKNFGFQFSDTQSYNSIDEFYREVEAQGYTISYTNISEDYINQLVDEGKLYLFQIYNKDFSPFSKGTPNMHTMYWKALFDEENLKDVVYKLNGQAEIFFRKKSIKDDKKIIHPKQIKIAKKIFKNSDKTTERVPDETIKRLNEFYQGKIQAKDLKNEYKKYLDNFSLFNKDKNRQDIDLIKDKRFTVDKFQFHVPITLNFKATGGDFINQDVLAYLKNNPDVNIIGIDRGERHLIYFTLINQKGEILLQESLNTIKEDQHKIETPYHTLLDRKEKDRDKARKNWGTIENIKELKEGYLSQVVHKIAKMMVEHNAIVVMEDLNFGFKRGRFKVEKQVYQKLEKMLIEKLNYLVFKDKVPNETGGLYKALQLTSKFNSFKDLGKQSGFLFYVPAWNTSKIDPTTGFVNLFNTKYENIEKARKFFDSFKSIRFNTEKNYFEFVFDYNDFTTRAEGTKTYWTVCTYGERILTFRNPKTNNQWDNEAINLTEQLEDLFGKYNIVYGKGNCIKEQIVAQTDKVFFEKLLQLFKLTLQMRNSITNSEVDYLISPIMNEKGEFYDSREEAKKGNSNLPKDADANGAYHIAKKGLWVLEQINNFKGDNWKQLKLAISNKEW

SEQ ID NO: 6491 - protein, 740 aa, unidentified
  source 1..740: note = MG29-168 effector
KLNFKTSTLADGWDLNKEKDNYAVILRKLNPITEQRDYYLGIMTSADKKIFEIKNNPSLGQNNYEKIIYKLLPGPSKMLPKVFFSDKNIAFFNPSEEILAIRNRGSHTKNGKTQKGFEKEEFNLEDCHKIIDFYKLSLAKHEEWSNFNFIFKQTNKYTDVSEFYAEVANQGYKISFLNFDEKYIKQLVIEGKLYLFQIWNKDFSVNKSEKNKNSRKNLHTEYWLNLFSEENLKDVVYKLNGEAELFYRKKSILKHITHLKNNAISNKNPIRDKETGELKEKSTFKYDLIKNRRYTEDKFFFHCPITLNFKAGNKSKVIHKSVNEFIREARGQINVLGIDRGERNLAYYTLIDPERNIIEQNSFNIISDDLQRKLDYQEKLDIIEGDRDAARKNWRKINNIKEMKTGYLSQVIHKVSKLAVEHNAIIVLEDLNFGFKRGRFKIEKQIYQKFEKMLIDKLNYLVFKDRDNNQTGGVFKAYQLTNEFESFKKLGKQSGIIYYVDAYKTSKICPKTGFVDLLYPKFENIKKSQEFIRQFEYVRYHKDENLFEFNFNYSKFASDNNKIKLARDNWSIWSNGIKLIQSKDNNYWRTKEIDVTAELKELFGKNNIDYGSGNNLIEQVIKIEEKYFYESLMKALKVIIQLRNSYTDYEIKDLKKKLGDNFKGHECDYILSCVKDTQGKFFDSRNAKDVEIQDADGNGAYHIALKGLMLLDKIKKADDAKIDLKIDRADFLNYTIERNR

SEQ ID NO: 6492 - protein, 1282 aa, unidentified
  source 1..1282: note = MG29-169 effector
MLNNFNHLYSLSKTLRFELKPVGETADYIEDFKSEYLKTVVAQDEQRAEDYLAVKALIDDYHRAYIEQSLSNVDSETGELLIAPEDFEDAYSYFQAFKAPGADRKARDEWLAELDKLRKALVRLFTGQKELFGKGLITDELPEWLEQQGRWEENKELVGRFNKFTTYFTGFHENRKNMYTAEAIPTAIAHRLMNENLPRFFANCDNYKSLVAKYTDLELSLDEALLSKFGVSSAGDIFQPRFFINLFTQSSIEDFEEVLGGRVDEDRGKIQGLNELLNLYRQKNNLKAREAPGFTHLYKQILSDTESRSFVLEAFETDREMLDAVGSYLELKSEPLSKLSSVMSALPEVDAEKVYVKGNDLTRVSQGAFGTFALIPAALTHYAETVVFPLEPDKKATKKLLENRESYGKQELYSLKELEEALSAFNESLDDQDGFSEKLKKAENHPLISYFATATKTAEAELEEAADALKPLLSLEQLNKKRIPPEGDSEEGSEGFEQVRRIHECLDAHMSLQQVLRPLHLVLGRKPIDVASKDLGFYARFDEAIEDYNAMTIALYNKTRNHLTKKSFSTDKVKINFESPTLLAGWDLNKETANKSIILRQNGKYYLGIMHPRHPKIFSKPPEAKVGDEAYEKVNYKLLTGANKMLPKVFFSKKGLETHNPSEQILALYKNGEHKKGDTFNIESCHKLIDFFKSRIPLYKRDPSDPYGWEIFDFKFSPTKTYKDISGFYREFEEQGYKLWFTHVTKAYIDEQIEQGHLFLFEIYNKDFSPFSKGKPNLHTLYWKGLFEQNNLDDVVLKLNGEAEIFYRKHSIAANEQIVHSANKAIVNKNENNPKPESTFEYDLVKDRRYTKDKFFFHVPITLNHKAQKPVRFNDQVNRALQKADDIHVIGIDRGERHLLYYTVVNQKGEIIEQDTLNTISTDQDYVVDYHHKLDQQERTRDKARKAWTNIDNIKELKAGYLSHVVHKLAELIVKHNAVVCLEDLNFGFKRGRFKVEKQVYQKFERALIEKLNYLVFKDTTEGQPGHYLKAYQLTAPFESFKLLGKQSGILFYVGASYTSKIDPATGFINFLKPHYESLAKSKTFFESMDSICFNAKRGYFEFSFDYANFSVPQTLDDYQTAWTVCTHGETRYHNQRNDKGIWETKAVNVTEKLKVLLNEAGVSYQNGEELKDAIAAVKSSKFYRSLYFLLRLTLSLRHSVTGTEEDFILSPVADEGGNFYDSRNASDAEPKDADANGAYHIALKGLWNLEKIDQWDGESRLNLAMKNVEWFQFASEKPFKE

SEQ ID NO: 6493 - protein, 896 aa, unidentified
  source 1..896: note = MG29-170 effector
MQTVFDQFTGLYSLSKTLRFELKPIGQTKELLEDFYKHCEGNPIVVDEQRICQYPKMKALLDDYYRLFIDKTLSRPIFSAEEITKAYELYCAAKQSHNSKQKESKYQKEYTAAKKSLRKKLAACFAEQKEEFGLDKYSHLFGSEQLPLNCWLQSRLQGGQITAAEYEEGLAALKAFERFTTYFTGFKENRDNLFAEVDKASAIANRVIEENMEKHFFNCRALADSTQKYPQLAEELGSFLSFFMPAYYGSCLSQQGIDCYNQAIGKELNGDSTKGVNQIINEYRQKYSLKTKDLPTLITLHKQLLSKKPDCPVSETLTTDQEMLQLAKYCYTTAISRLNELQKIMSDYLNDENLQFIYLKTKDLNALSKKMFGEWDTIRNAYFYHCQQLTDKEQKRFAANTKEVISLGLLQRLLNSYLPGSENPPPLVDPALYFKSFDLTPLRQAYEAAAPVLALTQLDQDKAPPNEGNPKGGLGYRQTILVKNLLDTILRAKDFYKPFLLEQDGKPIAVADSNELFYTQFTAAFAKLNCLYKKYNLIRSYASQKPFSTDKFKLNFNNSTLLSGWDLNKEEENTNILLRKDGQYYLGILKNTKLFADCSKYLCQDSVEHYEKMVYKQVSGVNKMFPKVFFAAKNLELYKPSAQILQIKAQKSHLKEANNPDAKNAWIDFCKDSIAKSEWPQYFKFKFKPAEQYPDVNSFYREADAQMYSLTFQNVAGAFVKQAVENGELYLFEIYNKDFSAYSKGKPNLHTLYWQMLFDEHNLCNIADNAEQPVFKLNGEAEIFYRKASLDDKVTHPAKKPIDNKNPLNGKKTSTFAYDLKKDRRYMQNKLYFHCPITINFRRGTLPQAVFNYQVNSFLQNNPQINLLGIDRGEKNLLYYTLINQRGQILKQGSFN

SEQ ID NO: 6494 - protein, 1196 aa, unidentified
  source 1..1196: note = MG29-171 effector
MGMIGDQFIGQYSLQKTLRFELRPIGETQKLLQDFKEEVQGNLLEYDAERARAYPMVKKVLDDYYRYFIDQVLSGFAFDSQTINEVYEMYKKAKKDAEAAKEYAVHTKKLREQLSAAFKAPITYYMLDKYEHLFNRNRESRLFEWLDIRFENDHLTENEYDEIKDVLDKFDKFTTYFTGYKENRANLFVADEKATAIAYRVVNENMPRFFENCIRMENIKKRHSDLYKLLVSFEGYFVPQAYANIICQPAITDYNKIIGRPTQNPDEKGVNSIINEYRQKNQIKNRELPMMAQLYKQLLSDRITVFLDPVINNDEEMQSIVAETIEIARGLFSEVINLTAIHALADNSENIYINSSALANLSHRVYDDWNLIYRACEAKMIKLEGKQKKGLENKLKMAIPMSELQNIIEEYIATLDEELKLSYYKIPILCNYFQNPPLDDFESATLKFEQIVKTTTPRTDLIHAIKEVLDKAMEVVRFFKPLYLFKGRSPLEVPDRNEDFYNEFERLYAELNLISKIYDRVRNYATKKQFSQDKIKLNFNNPTLLDGWDLNKEQDNLCVILIRDGNYYLALMNRDYRRLFDLKNDEVRNKALGKAGDHCYSKLEYKQVTGANKMLPKVLFAATNSDLFKPSQEILDIRKTGSHKKEAGNIEALHKWIDFCKQSIATHPEWNDHFDFKFRSTSEYSELTEFYNDFDRQAYKIKFVDIKVEYIDQLVKEGKLYLFQIYNKDFSPYSKGRPNLHTTYWRMLFGNENLANITMDTDRPIFKLNGEAEIFFRKASLEKQITHAKGQPITNKSKKDNGKESESIFEYDLIKDKRYTEDKLFFHCPITINFRAPGTTVGSFNRKVNYFVERNPEVKIIGIDRGERHLLYYTVIDQKGNILEQGSLNQIHNSYTSAGRVVEHNINYRDLLHEKEKGREEARKNWETIENIKELKAGYLSQIVNLLSNLMIKYNAVLVLEDLNAGFKRSRIKVEKQVYQKFEKAMIDKLNYLVFKELPPGSSGHYLNGYQLTAPFTSFRDLGRQSGFLYYVYPSYTSHICPKTGFVNLLNTRYESIEKAISFFEKFNSIKYNPGSDYFEFDFDYASFGKDVARSQWCVCTAGEKRYYYANHDKTSRECNATQQIKELLDKYNIEYIRGKDLLPEIIKKNDKGFFNGLMFLLGVVLQMRYTVSGTSNDDDFILSPVMDEQGQFFDS

SEQ ID NO: 6495 - protein, 795 aa, unidentified
  source 1..795: note = MG29-172 effector
VKDLLNTSLQPNEKLVQQKDKTLLIKNYLDSIVNLLHFIKSLKPREELSQKDEAFYGRFDELYEALNVITPLYNKVRNHLTKKPYSTEKYKLNFENSTLADGWDLNKEADNTTILLRKEGNYYVAVMDKKHNKIFRDIPASAKGEAVYEKMVYKLLPGANKMLPKVFFSKSRIEEFNPSTELLENYKNETHKKGESFNIQHCYNLINFFKSSICQHEDWKHFNFNFSETGTYEDLSGFYREVEHQGYKITFVNISESYIHKLVEEGKLYLFQLYNKDFSKYSKGKPNLHTLYWKMLFDETNLKDVVYKLNGEAEVFYRKKSIEDKNKIIHKANQPISNKNPENVKKQSSFQYDITKDHRFTKDKFQFHVPITMNFKAKGILNVNNEANKYLRNNPDTHIIGIDRGERHLLYLTLINQQGEIIKQESLNIVANEKQKTDYHKLLEAKEGKRDEARRDWGTIENIKELKEGYLSQVVHKIAEMIVDYNAIVVMEDLNFGFKRGRQKVEKQVYQKFEKMLIDKLNYLVFKTPKPNQPGLLNALQLANKFESFKKLGKQSGFIFYVPAWNTSKMDPVTGFVDFLKPKYESVDKAIAFIKQFDAIQYNKAKQYFEFVFDYSNFTEKAEGSKTKWTVCTTNTERYVWNKTLNNGKGGQEHNNVTEKLEVLFGNAGITYGNGENIISKITEQTGAEFYKALLKLLSITVSLRHNNGEEGEKEQDYILSPVAPFFDSRKATDTLPKNADANGAYHIAKKGLWVLEQINKCEDFKKLKLAISNKEWLEFVQKSSIKTNYPQPFA

SEQ ID NO: 6496 - protein, 1253 aa, unidentified
  source 1..1253: note = MG29-173 effector
MQVQKCIWDDFTNKYSLSKTLRFELRPVGKTLEYIKERGLIEVDKQREEEFNKIKKIMDEYYKEFIEIVLSNIEINLSDLKEYQTIYNKLIKDKSNLMLKKQYKHIQDKIRKQIYEIIKKTDNYNKLFGKELINDILPNWLGSKDRLADKELVMKFSKWATYFSGFFKNRENVFSEKPIPTSIIYRIVNDNLPKYLDNLIKFEAIKQLNNFSYSYMETELSTKLNNSSIDSFFILNNFNKHLTQKGVDLFNLVIGGYSENGIKKQGLNELIYLYSQKPENKEYSKMIRKLKMMPLFKQILSDKESFSDKFDTFINNEEVIKEITDYYTKIYSQWLPELKKLITDINNFDLTQIYINSSSISSISKKLCGDWETINKGLIEYAVNKLNLKTKAKKEAFLKNKYFSLYEIDESIKLLNLENPISICNYFSKFGESKTEQADLFKTVVNNYDSFKKIVLIDKHKFSEMDIEIIKSFLDSILGVIHFIKPIYINLNIKEEDNSQDAYETDADFYVRFNEIYMNNFNRIISIYNKTRNYTTKKPYSTKKFKLNFENSQLLNGWDANKEKDYYSLLFRKDDYYYLGIMAKGHNKIFENINNNQDIDSFEKIKCKLLPDPNKMLPKVFFSNSNIDYYKPSQEIKNIINYSTHTKGGIPKDGFEKKDFNLSDCHKLIDFYKSSLYKHPEWNCFNFKFKDTNLYHDISEFYDDISEQGYKLEFSKIRENYISDLVDSGKLYLFKIYNKDFSKNKAKKNKNSNPNLHTIYWREIFSKENLDNVRYQLNGGGEVFFREKSITSNKTIHPKKTTIDAKNPIKGKFKCTFDYDLIKDKRYTEDKFLFYCPITINFKAKGSGKDIHKQINEFISNTDKPVNVIGIDRGERHLVYYTLLDPNGDIIKSGSFNLVSDDLDRKFDYQDRLDTREKERDAARKSWQSIEPIKNLKEGYLSKVVHNISKLAIENNAIIVLEDLNFGFKKGRFKIEKQIYQKFEKMLIDKLNYLVFKDIPSTKIGGSLNGYQLTNKFESFSRLRKQSGILFYVNASYTSKIDPCSGFFNMILPNYESVEKSKELLKKFEYVRYNKNEDLFEFNFNFANFNKDIKLKKDNWSIYSNGTKLVNFRNKNKNNEWNTEEVNINEQLKVLFKIYNLDYMNSKNLMNSFNRIDSKDFFEQLIGLLKLILQLRNSRINTFNDYILSCVKDKNGHFFDSRTSGNNLPKNGDENGAYNIGLKGLIILDKIKKKEELKISKEEFVNYLIDKNM

SEQ ID NO: 6497 - protein, 1310 aa, unidentified
  source 1..1310: note = MG29-174 effector
MLEGFSNKYPVSKTLRFELKPVGKTLEYIEKEGFIEEDESLAQSYKKMKKTIDAYHKDFISRALSTIALKGLSDFQDAYDQSKAFSDEATKKRLIKAQDDMRKQITSVFTNADFKDEFGNLFKKELLTTTLEKFVIEYNTNNKEKLFFVDDFKSFTGYFLGFHENRKNIYSSDAKHSTLAFRLVHENLPKFIENINSLQAIKNNHPQLFDTLAKQVNHSLDFIFSSGFSIDDMLNIEFYDNMLSQQGIDRYNQVLGGVVLESASKKLQGLNELINLYNQKLPKGGGVRKAPKLRPMYKQILSDRSSLSFLPEKFADDGELYDAVNEYYIGHLLAQPDNTKQATLLESLKDMVTRLNNYDLTKIYLKNDKALTHISNTLFSDYSVLPTALSYYYETQVNPSYSESLEGTKTQRKKESLIKEKDAFLKGFHSVSTIERAYREYVVSIDEDSDLRAFGISTPVQHYFSQHFVSKPVDAEKPAVDLIQDIANKYTTIKGKLNSEVEPGTRELMQKGAEVANIKHLLDAIMSFVHFIKPLSVGGGEAGEGLDIDPSFYSEFLPLYEELGLFFPLYNKVRDYISQKPFSEEKFKLNFKNTNLLTGWDANKEKDRLSLIFRKGGHYYLGVMNKAHKKSFEDLPQATECSDDCYQKMHYKLLPGPNKMLPKVFFAASNIDYYNPSEALLENYKKGTHKKGADFNLKHCHELIDFFKQSIAKHEDWKQFGFKFSDTSSYEDLSGFYNEISNQGYKVSFIDVDSSYIDDLVESGRLYLFEIYNKDFSAKSTGRPNLHTIYFKSLFSDENLADTVYKLNGDGEMFYRRSSIKPENTITHKKGERVHSKNPNTPDASRVLDYEIIKDKRYTQDKFQLHLSMTMNFKASGIGPGQFNNLVKATIRDNKTKDMHVIGIDRGERHLLYLTVIDKNGKLVHQESLNNIVSGENSITPYHKLLDEREKDRGNARKNWGAVEGIKDLKKGYLSQVVHKLATLICEYNAVVALEDLNFGFKRGRFKVEKQVYQNFEKALIDKLNYLVFKDREPDDIGGARKALQLTSPFSSFKELGKQTGFLFYVPAWNTSKIDPVTGFVDLLKPKYENLDKAKDFIDRFDAIRYNKDKDYFEFVFDYDNFNNKATGTRTHWTVCSYGNKRFVYDKKANNNRGGQKTVDVNAELKALFDGYDIDYEKLAGSDLRPFIRNKADKALYSTLMHLLKVLLAMRYSKANTSGGADEDFILSPVADENGVFFDTRDYLPANKGEEKGAYGAMPQDSDANGAYHIALKGLWVMRQIQNHEGEDFKGLDLKITNKDWLNFAQTKPY

SEQ ID NO: 6498 - protein, 1239 aa, unidentified
  source 1..1239: note = MG29-175 effector
MAENKAIFDGFANKYSLQKTLRFGLIPDSESKKWIEKNLVIEKDEKLAEEYKKAKKIIDKVHKAFIESALEKLKLNEKALTAFEKETAKTKKERDKKTIEKIQASLRNEVADSFNKDKEEFKAMFSEKMIKENAPRFCNTAEEKATMKLFDNFTTYFKEFHKNRKNIYSNEAKATSIAFRIVHENLVTFVDNLRIFAKIREGGLDLDKAEYELKSILGKEKIEKLFSIEYFNKVLSQGGIDFYNRIIGGEFEEGSRKKIRGLNELINLHNQKERGKLPRFKQLKKQILSDRKKSLDFGFLDDSELLQAIEEFYLKELSDENGKRTPEMLRALFERAEEFDIEKIHLRNDSTLRELSNKLFGDWSAIENALSEHYEKENPSKDTKKYEKDKEKWLKQDQFPIATIETALSLYEHEKVDKGKCKGLFFRQFSSFKKEEDDKENLLERLEISYNRAKPILENKSPGNRLASDEQAKGKLKALLDALIDILHFVKSLRLKDAAISDKDYSFYGEFDPLFERLDGIVGIYNKTRNYLTKKPYSTEKIKLNFENSVLLGGWDRNIEDTKGGVIFRKDGQFYLGIINKNNKTILKNPPKAKDGEVAFEKMFYKLIPNPARDLHHTILSKKRSAKYKPTKTLLEKYEQKKHIKGDNFDKKFCHELIDFFKESIKKNPDWETFNFKFSETSSYEDISGFYREVGRQGYKVVFERIPASYIETLVKEGKLYLFKIWSKDFSKDSKGTPNMHTLYWRALFDEKNLKEPIYKLNGEAEMFFRKRSVEPKITHPAGKPIPNKNPDNLKKESVFKYDLIKDRRYSLDKFQFHVPITTNFGSEGQEFIDYDVRDAIKKSPVRIIGIDRGERNLLYLSMIDENGKILLQESLNKITSLYGGGKKTTDYNSLLARSEAGRDEARRDWKKIENIKEIKEGYLSQAVHKIATLMVENEAIVVMEDLNSGFKRGRTKVEKQVYQKFERMLIEKLNYLVFKKRSPEEAGGLRNALQLTSKFKSFEKLGKQSGFLFYIPAAMTSKIDPVTGFANELNPKYESVGKSKEFFSKFERISYNSKKNWFEFSFDYSNFKTKDGLEGKWVVCSTPHERFYRNGGAKGGAKGETLPMNANEELKKLFGEFGIEYSTGDCLKKEIVSKDSKEFFKKLTRVLASILSLRQNNGKTGQDEQDYILSPVEPFFCSLDGKDGLPKDADANGAYNIARKGLLAVRQIRSAEDPKKARLAIRNKEWLEFAQAMK

SEQ ID NO: 6499 - protein, 1282 aa, unidentified
  source 1..1282: note = MG29-176 effector
MLNNFNHLYSLSKTLRFELKPVGETADYIEDFKSEYLKTVVAQDEQRAEDYLAVKALIDDYHRAYIEQSLSNVDSETGELLIAPEDFEDAYSYFQAFKAPGADRKARDEWLAELDKLRKALVRLFTGQKELFGKGLITDELPEWLEQQGRWEENKELVGRFNKFTTYFTGFHENRKNMYTAEAIPTAIAHRLMNENLPRFFANCDNYKSLVAKYTDLELSLDEALLSKFGVSSAGDIFQPRFFINLFTQSSIEDFEEVLGGRVDEDRGKIQGLNELLNLYRQKNNLKAREAPGFTHLYKQILSDTESRSFVLEAFETDREMLDAVGSYLELKSEPLSKLSSVMSALPEVDAEKVYVKGNDLTRVSQGAFGTFALIPAALTHYAETVVFPLEPDKKATKKLLENRESYGKQELYSLKELEEALSAFNESLDDQDGFSEKLKKAENHPLISYFATATKTAEAELEEAADALKPLLVLDQLNKKRIPPEGDGEEGSEGFEQVRRIHECLDAHMSLQQVLRPLHLVLGRKPIDVASKDLGFYARFDEAIEDYNAMTIALYNKTRNHLTKKSFSTDKVKINFESPTLLAGWDLNKETANKSIILRQNGKYYLGIMHPRHPKIFSKPPEAKVGDEAYEKVNYKLLTGANKMLPKVFFSKKGLETHNPSEQILALYKNGEHKKGDTFNIESCHKLIDFFKSRIPLYKRDPSDPYGWEIFDFKFSPTKTYKDLSGFYREVEEQGYKLWFTHVTKAYIDEQIEQGHLFLFEIYNKDFSPFSKGKPNLHTLYWKGLFEQNNLDDVVLKLNGEAEIFYRKHSIAANEQIVHSANKAIVNKNENNPKPESTFEYDLVKDRRYTKDKFFFHVPITLNHKAQKPVRFNDQVNRALQKADDVHVIGIDRGERHLLYYTVVNQKGEIIEQDTLNTISTDQDYVVDYHHKLDQQERTRDKARKAWTNIDNIKELKAGYLSHVVHKLAELIVKHNAVVCLEDLNFGFKRGRFKVEKQVYQKFERALIEKLNYLVFKDTTEGQPGHYLKAYQLTAPFESFKLLGKQSGILFYVGASYTSKIDPATGFINFLKPHYESLAKSKTFFESMDSICFNAKRGYFEFSFDYANFSVPQTLDDYQTAWTVCTHGETRYHNQRNDKGIWETKAVNVTEKLKVLLNEAGVSYQNGEELKDAIAAVKSSKFYRSLYFLLRLTLSLRHSVTGTEEDFILSPVADEGGNFYDSRNASDAEPKDADANGAYHIALKGLWNLEKIDQWDGESRLNLAMKNVEWFQFASEKPFKE

SEQ ID NO: 6500 - protein, 800 aa, unidentified
  source 1..800: note = MG29-177 effector
EKTLTYQIVSEYNGLKGFLNTEHSEDYKLIQDKERVHQLKTFLDSIMNLLHFAKPLYLDKNASEEKNELFYTEFTPIYDELAKIVPLYNMVRNYLTKKQYSTEKFKLNFENSTLLDGWDVNKEKDNTGVILLKDDNYYLAIMNKQNNTVFEEIPKAINPQNTFKKMNYKLLPGPNKMLPKVFFSKSRTKEFGVSEKMLENYENGTHKKGDNFNLSDCHQLIDFFKASIQKHEDWKQFDFNFSETKTYEDISGFYREVEHQGYKITFSDVSKEYINQLVDEGKLYLFKIYSKDFSEYSKGKPNIHTLYWKALFAPENLADVIYKLNGEAEIFYRKKSINIDKAVTHNAKEKLENKNPNATKKISVFDYDIIKDRRFTFNKFQFHVPVTMNFKSTGNDFINPHVNEFLKNNPDVKIIGLDRGERHLIYLTLIDQQGNIIRQESLNTIKDEKHNIETPYHLLLDNKEEERDKARKSWDTIENIKELKEGYISQVVHKIATMMIEHNAIVVMEDLNFGFKQGRFKVEKQVYQKLEKMLIDKLNYLVFKDKPANEAGGIYKALQLTNKFTSFRDMGKQTGFLFYVPAWNTSKIDPTTGFVDFLKPKYESIEQVKTFLRKFKNIYFNSTKNHFEFSFDYKDFTTKADDTQTEWTICTHGDRIEKFLNSINKWDERTVTLNDEFVTLFDKYHIDYKDSETLKEKILQQTEKAFFERLIYLLRLTLQMRNSKTGTEIDYLISPVADKNGNFYDSRKVSQNLPKDADANGAYHIALKGLWVLQQINKTEDLKKVKLAISNKEWLQFVQK

SEQ ID NO: 6501 - protein, 988 aa, unidentified
  source 1..988: note = MG29-178 effector
MKSDFFKNFTSQYKLSKTLRFELKPIGKTLESIQSKGLLEKDEQRASSYKRVKKIIDEYHKYYIELALKNIQLSKLAEYYELFSQNKEVRNEDAFKNLKNELRKEIVKELTKGAYKEMFERLFSKELIKEDLKLWIKDRPEFQEELQFIKEFDNFTTYFTGFNENRRNMYTDQEQSTAIAYRIVHENLPKFIENIKMYESIKLKYPDLNFTPVLKDMEDLIQGKTLDEIFSLEYFNNVLSQHGIEFLNFIIGGRTREDGTKIKGLNEYINLYNQQQMEKNKRSPKFKQLYKQILSDRTSISLRFEAFENDSELLDAIEEFYQTELCEYESEGKTKNVFDEIKNLVTSIEAYDLEKIYLRNDTNLTNISQRIFGAFGVFKDAVSYYYDHVIDPQFQTKIAKAKGEKALKKLNDLKAKWNKEYISIAVLQTALDKYMESVDDSLEIKKTYTLKVIADYFKNHFKVIDEEKKETDLVYNIKSQYLGVKGLLNIEKSENKILAQDKEKVHQLKSFLDSILELNHFVKPLNLIADALLEKDEVFYSQFAPLYEQLNKLTPLYNMVRNYLTQKPYSTDKIKLNFENSTLLGGWDVNKEIDNSSVILRKEGLYYLAIMDKDNKRIFLNVPGIENETGFYEKMNYKLLPGANKMLPKVFFAKSRIDFFNPTQEILENYKNETHKKGDTFNIDDCRALIDFFKSSLEKHEDWKQFNFKFSPTNTYQDLSGFYREVEHQGYKMSFENIAADYINKLVEEGKLYLFQIYNKDFSTFSKGKPNLHTMYWKALFDEKNLANVVYKLNGEAEVFFRKSSIEEKNKVVHKANESIISKNPLTKGKLNTFEYDLIKDRRYTVDKFQFHVPITMNFKATGSEFINFQTNEFLKNNPEVKIIGLDRGERNLIYLTLIDQKGNIIIQESLNTIKNKVRDIEINTPYQELLNRKEKERDEARKSWGTIENIKELKEGYISQVVNKIATMMVEHNAIVIMEDLNFGFKR

SEQ ID NO: 6502 - protein, 980 aa, unidentified
  source 1..980: note = MG29-179 effector
MPKKSLDQFTFQYSVNKTLRFALTDPQGDMEKFLANMREGELKRILVEDKQRAEDYKQVKKIIDAYHREFIEEVLGQKGVLTEEDMNEYVTIYEEFKGLSRDSKNREKVIKKKRDIEKRLREAIVKKFKKNAKYKKLFNAKLITELLPQWLEERRNQKEIYDEAKYSEEKHLVEKFNRFATYFTDFHQNRANMYVEKDQNTAIPYRIVNVNLPKFLDNYLNYEKLIQNHSGIDFSSIEKDLKGELRDLKLSEFMKPSNFLACLNQSGIDSYNTIVGGKTLEAGKKIQGINEILNQYRMKLDKSEAKKIPLMTSLYKQILSDRESHSFLPEQFTSDQEMLKAIREFYESISETKEGEKKSLLNNIKEFLDSFPSENTDRIYIKATEITRISHTLFAGDWALIHRALEYSKLDSQLKKEHIISIEEIETALQKYKEDIDEEDEAIKKKLGNPHPVIDFFKSAEKVEKVEETKNESNSNPTPYKKFNIFATINQHYQAAKEILKLEELHKDRLSPQKEGDKGGKGFQQVTKIKNLLDAIKDLLDLISPLYLEYKRQKIDVSDKDDRFYVELDILYDELFSIVPLYNKVRNHVTKKNRNEERFKINFDKTTLLDGWDVNKETANLGVILRKDNNYYLAIVHKKHSSVFNYVKKRGDSNNKLKIKDGLRRDIIAQNGEGCYEKMLYKLIKEPARDLPHAVFPEKKKNNFNPPSEEIQRIYNKYKKEKQFVNRAQMHQLIDFYKESIKRNIDWNGFNFEFSFTKEYNDIQEFYNEVKRQSYKIDFDKIKSSYIEDKIKKGELFLFKIYNKDFSPHSKGSPNLHTSFWRLLFDEKNLKDTVAKLDGQAEIFFRPASIKKSERKIHKKDVPIENKNLNNAKKESKFKYDLIKDRRYTQDKFLFHVPITLNFSTQNKTAKQFNTEVNHFLQHNTNVNIIGIDRGERNLLYYTVIDQEGKILEQESLNIIANRIPNQNKVDSHLKCNTFY

SEQ ID NO: 6503 - protein, 1295 aa, unidentified
  source 1..1295: note = MG29-180 effector
MWKLGRNVRMARKKSIFDNFTNMYRLSKTLRFELKPIGKTLENIERKGLISQDEERAKSYERMKETIDGFHKSFIELAMSRVKLTHLSAFADLYNASPEKKKEDAFKKKFKKVQADLRTEIAKGFRTGEAKEIFSKIDKKELFTKLLEEWIKSQQEEYYFDEEFKKFTTYFTGFHTNRKNMYTEEEQSTAIAYRLIHENLPKFLDNIKTFQKIKSTPELYEKCMILFNEIAQYLDIKRIDEAFEFNYYNNVLTQKQIDAYNLILGGRTLEEGQKKIQGLNEYINLYNQKKDKKDKIPKDKIPKLKQLYKQILSDRERISFLPEVFEDGFNETASQKVLNAIEEYYKANLLAFQQDGKGETENVLEKIKSLVAQLKSYDLNKIYIRNDRGLTNISKALFDDWNMIKSALEFSILQTRKKASTKKLKKSHFSIAEIEKALFMYRNEHEALKNLKEKDHPVADYFQTYFKAAKKDGSDKEFELIANIEAKYSCIKGILNTEYPKDKRLHQDEETIDNIKAFLDSLKEFLHFVKPLSLPSDTPLEKDEMFYTHFQVYYDQLQLLIPLYNKVRNYATQKAYSTEKFKLNFQNSTLLDGWDVNKEPDNTSVLLRLNGLYYLGIMDKGNNNIFRNIPQASPGELVYQKMVYKLLPGANKMLPKVFFSKSRIHEFAPSEELQKKYQAGTHKKGEKFNLEDCHNLIDFFKESIAKHEDWKKFRFQFSDTSSYEDLSGFYREVEQQGYKITFQDVPKSYINQLVDEGKLFLFKIWNKDFSEYSKGKPNLHTMYWKALFDTENLKNVVYKLNGRAEIFYRKKSVPTDKKVVHKANEPIENKNPNNAKKQSVFEYDIVKDRRFTVDRFQFHVPITLNFKAIGNEYINSDVLEYLKNNTDVNIIGIDRGERHLIYVSLINKKGEILEQFSLNDIITSYKNENNKDVEVKTPYRTLLDKREDERARARENWGTIETIKELKEGYISQVIHKIVELMVKHNAIVVMEDLNSGFKRGRSKVEKQVYQKFEKKLINKLNYLVFKDKANNKSGGLYHALQLTNKFVSFQKLGKQSGFLFYVPAWNTSKIDPTTGFVNLFNTRYENLEKAKWFFRNFDDIRYNTTKGYFEFEVKKYSKFNAKADGTRQAWIICTHGDRIKTFKNPEKNNQWDNKEIILSDELKKLFDTHGIDYKNNLRDQIISQTEKKFFERLFELFKLTVQMRNSISKSTESGDDYLISPVKNKNNEFYDSRKAGDGLPVDADANGAFHIAKKGLWALQQIRSHEGEWKKLKLAISNKEWLQFVQVGAEWNRT

SEQ ID NO: 6504 - protein, 700 aa, unidentified
  source 1..700: note = MG29-181 effector
IDEYHKDFIEKALSGIRLTKLDDFYSQYILSKEQRDDNFFDKIKEELRKEIVAAFSKGELKIQFANMFKKELIKEDLLNWIGDEKRNSVKEFENFTTYFTGFHENRKNMYSAEEKSTAIAYRIIHENLPKFIDNIRIYDTIKFKHKNLDFSPILNELKDIIQGKSLDEIFTLDYFNNLISQNGIDFLNSIIGGRSGKSSEKKIKGLNEYINQYNQKQNDKKDRIPKFKQLYKQILSDRSSISWMPQAFEKDTEVFDAINDFYHVELGNAEIDGRSVNILNAVKTIVKSLSDYEELDKIYLRNDLSITTISQTIFSDYGVLGRALNHYYETFVSPQWLVDYAKAKETKRKKLEAEKEKFIKSTYISIAVLQTALAEYVKTLDDDSSIKQKYSATLIADYFTKYFYAKDENGNEAKNTLTDQITIEYGDFKNVLDNKRSVDYKLIQDKKHVHQIKIFLDSIMNLLHFVKPLYVDKSASEEKNELFYGEFTPVYEELAKIVPLYNKTRNYLTQKPYSIEKFKLNFENSTLLDGWDANKERDNTAVILIKDDRYYLGIMDKRHNTIFEKIPETNNRNAVFKKINYKLLPGPNKMLPKVFFSEKRMPEFGVPEEIYEKYNAGTHKKGDNFNLSDCHQLIDFFKASIQKHEDWKQFDFNFSETKMYEDISGFYREVEHQGYKITFSDVSEEYINQLVNEGKLYLFK

SEQ ID NO: 6505 - protein, 1436 aa, unidentified
  source 1..1436: note = MG29-182 effector
MKTLFENFTNQYSVSKTLRFELIAQGKTQEHIEKQNFLNDDEELAEKYKKAKKIIDEYHKNFISDKLFSFAFTPEDLRAYEHAYQAMKKDKKNIKLMNDFASRQDDLRKRIAKELQEDNYLYAKEGEKKKFIKQNLIKWLENNSISLSGIPDPKTIINDFENWTNYFSGFNDNRKNIYSEKRIGTSIGYRLVHDNLPKFLENIKRYNKAKTAGVNFSNVEKTYGVKLDEVFSLEHFNKCLTQKGIDEYNLIRGGQSKKGNNKEQGINETINLHVQQLHRRLERATDDDKKELADKIKYIKSCLLEELYKQILSDRSQLSFRLDSIKNDGDLCRQIEHIFHMDNAGNLWGKKENVDRDTGEKTESDFNISEAIKKVLQAFKEADPERLYIRNKSSNAITEISQYLFGNWSLITRSLDYYVKKIIFPNPEKKKETAKQKVDREKKCEGWLKDTTYFSFAEIHTALELFFQQYSDEELLDEKKENNDEEQGITKAMKEIALSKPLFSYFKELKISKKNEETNKFEKKELLKQIKESYPATQKVFEQYRDVEAELLKNKKDGEVQVVKNYLNALMDLHHYLKPLYVMLSPKDEKNQEEIFEKDNGFYDDFDPLFNVLKLIVPLYNQARNYLTKKPFSVEKYKLNFGHHNLLGGFVDSYTNSDNATQYGAYLFRKKHQRYDAYEYFLGISTDAKLFRCHLQNDISENDKSKYERLEYYQPKSTTFFSDEYSSKNKKKIMDCLLKKVEAKIEKTLKGNSDFDEFLEKLREADTPGKQIEIIKKQKEFINILDEKEVEEIFNEAIAEMKNFIIKYVERNPQLIKLQETRYSGHEGFTAIIKDLQKIAKENKVFNYFHVSENEFNEACNRETKPLLFFKITNKDLNYYEKAAQGLRKQEIGTKNLHTLYFEQLLSGKQQVIDIGKGEVFYRRKTPFYKPIIHEENKSILCRTYKEDGKLKTLTDDIYKELSLFYKGNIPEEKLSEASRKLKDLVKVNKFKYKIMKDKRYTEDKYLFHLSINLNFDQPPKLEKFNDSVNDSLKRNDNVKILGIDRGERHLVYYTLIDDKGNIVKDDNGNYLQGSLNNPTGKKDYHDLLDKREDERDKARKAWNTIDRIKDIKEGYLSQIVHNIASLMIKYNAIIALEDLNFGFKKGRMKVEKQVYQKLEEKLIDKLNYLVFKNECPEKPGGLLNAFQLTAPFKSFKAMGKQTGFIFYVPAYHTSKICPATGFADLLYPRYKTVDKSKKYFAKFEAIRFNRQENYFEFEIKNYNAFNPKAEDTKQDWTICTYGLRLDTYRNPKKNNNWDTQEVDLTKELQNLMQSQGIQFIDGKCIKEEICRQNDSQFFKRLMKLLRLTLQIRNSRVNSDEDWIISPVRVQGEIFDSREADESMSQNADANGAYHIALKGLWCLRQIREAKDLKKVNLAISNKEWLQFVQDRPFAK

SEQ ID NO: 6506 - protein, 949 aa, unidentified
  source 1..949: note = MG29-183 effector
MPEVFQTDKEVLEAINNFYCVGLENFEIDGKSINLLDTVETMIKSLSSYKDLAKIYLRNDTAITSISQTLFADYSVLGQALNYYHETFINPKYKTDYAKASETKRKKLDKEKDNFTKSAYLSIVTLQTALAEYIKTLDDDSDIKQKYSSTLIADYFINHFYAKDENDNKTKKTLTRQIANEYSILKDFLNTEQSEDYKLIQDKEHIHQLKTFLDSIMNLLHFIKPLYVDKNASEEKNELFYAEFTPVYEELAKIVPLYNMVRNYLTKKPYSTEKFKLNFENSTLLNGWDVNKEKDNTAVILLKNNSYYLAVMNKQYNTVFEKIPKIENTQTIFRKMNYKLLPGANKMLPKVFFSKSRMEEFGVSEKMLKNYKAETHTKGNNFNLSDCHQLIDFFKASIQKHDDWKQFDFNFSDTKTYEDISGFYREIEQQGYKITFSDVSEAYINQLVDDGKLYLFQIYNKDFSEYSKGKASLHTLYWKALFAPENLADVVYKLNGQAEIFFRKKSINAEKTIVHKAKEELENKNPLASKKNSTFDYNITKNRRYTVDKFQFHVPITMNFKATGNDYINPQVNEFLRNNPNVKIIGLDRGERHLIYLTLIDQQGNIIQQESLNTIKDEQHKIETPYHKLLEKKEDERDKARKSWNIIENIKELKDGYISQVVHKIAKMMIEQNAIVVLEDLNFGFKQGRFKVEKQVYQKLEKMLIDKLNYLVIKDNKVNEAGGIYNALQLTSKFNSFKDMGKQTGFLFYVPAWNTSKIDPTTGFVDFLKPKYESIEQAKTFFDKFKNICFNSTKDYFEFSFDYKDFTTKADGTRTEWTVCTHDERIEIFRNPNKLNQWDTRNIVLSKEFTEFFDKYHINYRKGENLKEQILKQNEKVFFEKLIHLLRLTLQMRNSKIKSEVDYLISPVVDKSGNFYDSRKVAKNLPQDADANGAYHIALKGLWILQKGL

SEQ ID NO: 6507 - protein, 786 aa, unidentified
  source 1..786: note = MG29-184 effector
MSAQSALSTLINKYSLSKTLRFELIPIGKTKESIDRKGLLSQDVKRAQSYKEVKKIIDEYHKEFIEKSLINAKLKGLEEFSKLYYKLQKEDKDKKNIKKMQDNLREQISDLFKNNKKDKWNILFKEDLIKKELPLFAKDDKQKNLINEFNKFTTYFTGFHKNRKNMYAEEEKSTSIPYRIIHQNLPKFLDNIRIFEKIKKNKINTDVIEKELSLFLNGIKINDIFSINFFNDVLNQKGITFYNTILGGVSEKDRTKIKGINEYVNTEYNQKQLDKRSKIPKLKQLYKQILSDTETASFVLEQFENDNQLLEKIEQFYNTELINYETEGKTQSVFLQFEQLFKNMQNYDASKIYISNLSIANISKIIFGDWSIICNALAEWYDKHNTKGKKINEYKKENFLKQDFSIQQIEDAVLEYKNDTLNKEINFLLNYFASFLNEKSKKNIIQRIETEYSKVKDLLNTDYPEKKKLASDKDNVSKIKAFLDSLMDFLHFVKPFNIKKDTGLEKEENFYSIYVPLFEQIDKIIPLYNKVRNYLTKKPYSTEKIKLNFENSTLLDGWDLNKESDNTSVVLRKDDLYYLGIMDKKHNRIFKELPSQNGNESSYEKMIYKLLPGPNKMLPKVFFSKKGKKQFKPSKKLLKKYEDGTHLKGDNFNINDCHNLIDFFKESIAEHEDWKQFDFKFSSTSSYKDLSNFYKEVEKQGYKITFQNISENYINQLIDEGKLYLFQIYNKDFSKYNKGTPNLHTLYWKMLFDNDNLKNIVYKLNGKAEVFYRKSSLILGDNIVHK

SEQ ID NO: 6508 - protein, 1004 aa, unidentified
  source 1..1004: note = MG29-185 effector
MEALHMNNFYSEFVNKYSLSKTLRFELIPQGKTLENIKTKGFLEEDEERAKRYEKVKKIIDEYHKDFIEEVLSAVNLSQEELKELAKAYEGAKNKDENSKKALVDLQNKARKKIAEFFTKQEKFKTLFAKELIKNDLDSWLDEKYAEKEASEKKEVLKDFKTFTTYFTGFHENRKNIYKDKEQSTSIAYRIIHDNFPKYLDNAKKIEILLKEFPDINLKQIERELNDILQDKNLKDFFALENFSAFLSQSGINKYNSIIGGKTLEDGTKLQGINEAVNLYRQSKDHLLKTVAETEAQNLKSEIKKLRSLKLVSLYKQILSDQDSLSFLPEKFEDDKTIIDAINNFYEENIINIKIEESKEPQNLFNELQIILDHLKDADLDKIYIKNDKAITDISQYLFADFDLIKKALEYYVKNELIKAKKQDLSTKKEEESWDKWVNKTSYFSISTLNKALIYYKENLEDGNEDKKKFSDFKTISQYFLNTIKEKINACIENHKKTVSVLNAEYGSNSHDLITDKKIGGRVEFIKNFLDSLQTLLHFLKPLYIAPIKNEDKKAADILEKDSSFYTDFDIYYEKLNDLVPLYNKVRNYLTRKPYSLEKYKLNFKNSLLADGWDQNMESAKTSILFIKNGIYYLGIMDKNHNKSFQNIPSCSDINKPYQKIVYKLLPGANKMLPKVFFSDKNIKDYQPSEELLNNYNNGTHKKGEYFNKAHCHALINFFKESIKNHPDWKHFDFKFSDTDTYSDISQFYREVESQGYKISFENVAETYINTLVDEGKLYLFQIYNKDFSKYSKGKPNLHTLYWKALFDEHNLEDVVFQLNGGAELFYRKLSIKTENRTIHKANKILENKNNLNNKKTSSFPYPLIKDKRFTEDKFSFHVPIKINFKSVNTGRFNDQINKYLKSNPNIRILGIDRGERHLAYYTLIDQKGNIKKQASFNIITDYYQSKEYKKDYQVKLTEAEIARDKARKSWGSIENIKNLKEGYLSQVVHQICTIVIENNAIVI

SEQ ID NO: 6509 - protein, 1281 aa, unidentified
  source 1..1281: note = MG29-186 effector
MAENSIWAEMTNQYSLSKTLRFELKPSDKTEEFIEKNGLINEDEQRNKDFLYSKELLNEYYSHFIEKRLGEIQIDVGVLKDYFETYKEFNKLKQKGKEVDSKELKKAEARLLASQNHLRKALHRVFFMNKNISDKRDEKDIIAAVKYHADNGVVNEKVDRLNRFLIDKCTTYFTGFFNNRDNVFTSEEIPTSVFYRTINENLPFFVKNIQKYEKLKDIIPEKELITRENDLKKELGEFSVKEVFSIKYFNSCLNQKGIDKYNQILGGVKKENIQIKGLNELINELSQNKDKSIRKLKMTPLYKQILSKSESKSFKIDTIKNGKELNYKINEFYELVSTSNKDQKEALISLLEKLFKNERELDFDGIYVNSKGLRELSNKVFGDWYVIESALKQQYKSKILSTGKKEKDDSKKDKETSEWFKKTKQFSINDINSSLEAAQNDLITNKNKNIWAYFKRLENQKELNLITEINESFKDLESVQFGEDKELLNDSNEENVKKIKKALDSVQELLWFISPLMYDKPKEEVFDLNLDPEFYGQFNIIYEGVRQIVPLYNKTRNFIAQKPFNESKFKLNFENSTLLDGWDKNKEPDNWSILFRKDNNYYLGIIASGKGNNRIFEKIPEYKQGDCYEKMNYKLLPDPSKMLPKVFFADKNIEYYSPPKEILSIRNHSSFTKGGTPQEGFEKKEFNLKDCHKMIEFYKECISKHPEWNEFGFKFKKTSEYSDTSEFYKEVSDQGYKLTFQKVSTNYLDEMVNTGKLYLFNIWNKDFSKFSKGKPNLHTLYWKEIFSENNLKDVVYKLNGQAEIFYRKKSLSGKVTHLKNIPIKNKDSINGKETSVFKYDLIKDKRYYQNKYLFHCPITLNFKAKGSSFINNKINEFIIKNCNKINILGIDRGERNLLYCSLLNSNGKIILQKSFNVMQDKFGRNVDYYNKLDAKEKERDKSRKEWKNIENIKELKEGYLSQIIHEIAKIIIEHNAIVVLEDLNFGFKRGRFKFEKQVYQKFELKLIEKLNYLVFKDKNSTLAGGLLHAYQLTNEFDSFKKLGKQSGVLYYVGANYTSKIDPKTGFANLLHPSYENVEQSKEFFGKFDSIKFNKTEGLFEFDFDYSNFNKDSKLKKNQWKVFTNGERIINERTKNNTYESKKINLTDELKKLFEEEKIPFTETNNLKGHIISSNSKNLHKGLTNLLKYTLQLRNSNNKTNEDYILSCVKYDEKNFFDSRNAKESEPKDADANGAYNIGLKGLMLIEKMKEQSKKQRGEKQKYDLKISNEDYFNWVTNRNQS

SEQ ID NO: 6510 - protein, 731 aa, unidentified
  source 1..731: note = MG29-187 effector
TKDLLDALLDLHRLFKGLKIDDAEKDLVFYSYFDTYVDALSAIQPLYNKVRNFKTKKPYSQEKFKFTIGKSNLLNGFVESKTDKSYNGTQYGGYLFRKKRNDGRYNYYLGISSKANLFSFYGEELSPEDVCEFERLHYYQVKTNSIYGSSYDGDFSQDKETLPEYEVIEKLQNVLKIKYQHVKSLKEIANRSYPSLKSLQDDIEIAVEEKSFIYKPVSQSEMEQVLSEGSMLFFWIYNKDFSEKKKNKNSRDNLHTMYFKALMRENSNNDVFDLGKGEIFFRRKSINYDDYIWENGHHHKDLKDNFEYPIIKDRRYAVDKFLLHLSIFINYKKPNNMNINSKVNDFISKQSDKIKIIGIDRGERHLLYLSLIDAKGKIIEQYSLNQIVNSYNGKEFHLDYHGKLTEKEKKRDEERKSWKSIENIKELKEGYLSQVIHKIATLILEHQAIVVLEDLNFGFKRGRFKVEKQVYQKFEKMLIDKLNCLVDKKREWSEPAGVLNALQLTNKFTSFEKLGKQSGILFYVPAWNTSKMDPVTGFVNLFNTKYQSVEKSREFFSKFRSIRYNEEKGYYEFEFDYNDFHDRAQGTKSHWTVCSYGKRIVNFRNKEKNNQWDWKEVDPTQELKELFGSAKGDLKEFIESHDKKDFFEKFLKIFSRILQMRNSATGTDIDYMLSPVANEKGNFFDSRKSDGSLPLDADANGAYNIARKGLMLVEKIKNADDKSKVKLTVTN

SEQ ID NO: 6511 - protein, 1338 aa, unidentified
  source 1..1338: note = MG29-188 effector
MNQLLKRFTNQYQLSKTLRFELIPQGKTLDFIKEKGLLSQDEQRAQSYKEMKGTIDEFHKYFIDLALSKVKLSFLSDYDCLYNQSVESKKDPKFKDELKKVQDALRKEIVKSFSEGDAKGIFAILDKKELITVELEQWFANQDKKEIYFDDKFKTFTTYFTGFHQNRKNMYSTEANSTAIAYRLIHENLPKFLENAKSFAKINQVLELHPQISNVYKEFEKYLNVKSIDEMFELDYFNEVLSQKGITVYNNIIGGRTAEEGKSKVQGLNEIVNLYNQNKDKKDRLPKLKQLYKQILSDRISLSFLPDAFKDGKQVLQAVFDFYKVNLLSYTIEGQDTSQNLLQLIKQLLQNLSSFDIDKIYLKNDNNLTAISQQLFGDFSVFTSALNYRYETLINPKFELEYLKANEKKRESLDKAKAIYTKQDYFSIAFLQEVVSDYMNSLDDNSDLSKKFTPNCIADYFTNYFIAKNEEDSDKTFDLLANISAKYQCIQGILENASEYEDELKQDQILIDNLKFFLDSIMELVHFIKPLQLKSESITEKDTAFYDVFDNYYETLNLLIPLYNMVRNYVTQKPYSTEKIKLNFENKNNFLGGWVDSKTENSDNATQGGGYLFRKKNKIGEYDFFLGISNDVKLFRSHLKSEITENDLSEFERMDYYQLKSASVFGNSYVGNYEDDKNNLFEVIYNFAKEKNKNILNEFDIYINKQNGDIKPTPSGLFKIVNEKFSFFVNELLNFEDFNNANNLIINNLKQTILSLHRVPKSQTYKDINFKIFTEPIKVIEDLTNEKSFSYFPISKIEFEDVTNRSNNPLFLFKISNKDLSFSDSLDNGLRKLQKRGKDNLHTLYFKALMQGNQNIYDIGTAEIFYRKASISPKNIITHKVNRPINAKNPLTPEAKNTYEYDLIKDKRFTEDKFQFHLSIIQNYKEPKKPNKDINQTVLEYLKNNPEVKIIGLDRGERHLVYLTLIDQKGNILKQESLNVIKVDKHETHYHTLLHNKELERDKARKNWGTIENIKDLKEGYISQVVHKIATMMVVENAIVVMEDLNFGFKRGRFKVEKQIYQKLEKMLIDKLNYLVLKNKQAQELGGLYSALQLTNKFESFQKMGKQSGFIFYVPAWNTSKIDPTTGFVNYFFTKYENVEKAKSFFEKFDSIRFNGTYFEFEVKNYSNFNPKAEGTQQNWTICTHGERIITFRNTEKNSNWDSKTVLLTELFEDFMGKHQIIYGNGECIKTQLDSKNDKLFFEELLNLFKLTLQMRNSVTGTDEDYLISPVKNAQGIFYDSRKADDNLPKDADANGAYHIAKKGLWILEQVNKTQSAEELKKLNLAISNKEWLQYTQQ

SEQ ID NO: 6512 - protein, 870 aa, unidentified
  source 1..870: note = MG29-189 effector
VKNASLSDISSRVFKSHGLIKAALTHHAESVYVPTAPSAKVTSKLQKQRDDYLAQDVYSLAELDQVVSSYLSGLEEEASWDGVDKQKPISMYFVSAIKKAIEEKDESGTTFNMHLEAAKPLFALDALSKQRNMPKNESDFGGEGHQQIQKIHALLDAMMVILHVAKPLHLVNNKKPIEIFDIDSEFYGEFIEVYEKYSYELVDLYNQTRNYLTKKSFSTDKIKINFDAPTFMDGWDLNKEIDNKAFILKDGGNYYLAVVCKDGRDISFDFDEKFDGDFFEKLNYKLLSGANKMLPKLFFSKKGVDKFKPSTEIIEIYKSGSFKKSEASFDIRKCHKLIDFFKENLPSYKVNDSDKYGYEVFDFKFSKTSDYKDISEFYKEVERFGYKTWFSKVPKSYLDDCVRTGKIAMFQIYNKDFSEHSSGSPNLHTMYWRGIFCQENMDNPTIKLNGEAEMFYRKHSIQKNERTIHRSGENIANKNSNNHKKESLFEYDLIKDRRYTKDKFFFHVPVTLNFGASSPGWFNDKINKAIKPEKDIHIIGIDRGERHLLYYTVINQKGEIIKQGSLNEIETDQGYSVDYQLKLKAKEDQRDAARKSWSTVENIKELKEGYLSQVVHKLSKLIVEHNAIVCLEDLNFGFKRGRFAVERQVYQKFERALIQKLNYLVLKDRKHGEPGHYANAYQLTAPFESFEKLGKQTGILFYVPAAYTSKIDPMTGFVNLLDTRYESQEKSKDFFGRFNSILYNKAKDYFEFCFDYKKFPARVDFTGCRTAWTACTYGDVRYANQKNNHGKWETKSVNVTEELKKLFDSASIKWDVGCNIKDDICKADDKNFYSTLSWLLKLTLSLRYSKTGTDDDFVLSPIAGADGNFF

SEQ ID NO: 6513 - protein, 742 aa, unidentified
  source 1..742: note = MG29-190 effector
IENNLQCSFEKIMTINSFVDFMSQEGIDKYNTFIGGSPALDGGEKVQGINEFINLTRQQSGAKRAQFPPLQEFYKQILSKSDISFISDFTNDKDMFEAIKIFHELYFNEKDESGISFFNRVIKDSRELEKELSFEKENLYLPKDKVTFVSKKITGHWNNINNELLEQLGEKEFNSRKYFSFSEIEKAVNDGGQAERFVVASNSSSLITLFNEELVKNLRDSNQAWVELIETGVLDCGKLDSNRSRESDKGFIQIAAIKRFLDSVLGLSGFVRDWQASKDILKIETRNKHWYDHINDFISQFQVIDLYNMVRNHATKKPASKEKLKINFENSTLLAGWDRNKESDNYCALFQKKGLYYLGVMTPTSNKIFDYDKKEDLRNAVLAKKGEECYRKINYKLLPGPNKMLPKVFFAKSNKELFNPSDEIIKIKENKLYSKSATAVNGLDDLYKYIDFCKKSLVKHPDWSKSFGFKENSFTETYEYVSVDQFYNEVETKGYSITFDNIKEDYINKRVESGELYLFQIYSKDFSQAKKKKGTDNIHTIYWKGLFATENLEKPILKLNGQAEIFFRKASIKYDPDVMQKGHHHEKLRGRFDYPIIKNKRFTMNKFFFHCPITLNFGSPSSPYRFNDMIRSFVRNNSDVNIIGIDRGEKHLLYYSVVNQKGKIVEQGSLNKISNGFKPKGEDKERLIDYHSKLDKMESDRDKARKSWSTIENIKELKAGYLSQVVHKLSELIVKHNAIVVL

SEQ ID NO: 6514 - protein, 807 aa, unidentified
  source 1..807: note = MG29-191 effector
TSEYNGLKGFLNTEQTEDYKLIQDKERVHQLKTFLDSIMNLLHFVKPLYVDKNANEEKNELFYAEFTPVYEELAKIIPLYNKVRNYLTQKPYKIEKFKLNFENSTLLAGWDVNKERDNTAVILIKDNYYYLGIMDKQNNTVFEKIPAIKNTNTVFKKVNYKLLPGANKMLPKVFFSESRIAEFGVSEKMYENYKIGTHKKGDNFNLSECHQLIDFFKSSIQKHEDWKHFDFKFSPTKNYEDISGFYREVEQQGYKITFSDISEEYVNQLVDEGKLYLFQIYNKDFSPYSKGKPNLHTLYWKALFDPKNLADVIYKLNGEAEMFFRKKSINPQKSVVHKAKKNLQNKNPLATKKTSIFDYDIVKDRRYTVDKFQFHVPITMNFKATGNDYINPKVNAFLRNNPDVNIIGLDRGERHLIYLTLINQQGHILQQESLNTIKDEQHHIETPYHKLLDGKEIERDKARKSWDTIEPIKELKEGYISQVVHKIAAMMIKHNAIVVLEDLNFGFKRGRFKVEKQVYQKLEKMLIDKLNYLVIKDNKATEAGGLYKAFQLTNKFSSFKNIGKQTGFLFYVPAWNTSKIDPTTGFVDFLRPKYESIEQAKTFLSKFKNICFNSTENYFEFSFDYKDFTSKADDTQTEWTICTHGNRIEKFRNPINKWDAKTITLNDKFEELFNNYHIDYKKEGSFKETILKQTEKTFFKQLIDLLRLTLQMRNSKTEKDETGKDIDYLISPVTNKSGNFYDSSKASKNLPQDADANGAYNIARKGLLILQQIKETKTDGDLKKLKLAISNKEWLQFAQNQILQIDS

SEQ ID NO: 6515 - protein, 1355 aa, unidentified
  source 1..1355: note = MG29-192 effector
MSIFKDFTKQFSLSKTLRFELKPVGKTEEWIKKHGVISVEEDKLEGKDAKRAEHYKYVKILLDNMHRLFIEEAFERVENDFLIQHLKSISQENDYSFTDDRTLKKIFQEILDKTAADWMKEYSIEMPEIWQKELAGLNEKINTESDKKRKKGFESAAKALKNKIENPLKDFKKTDSSILYSNVESIQLLEWKIIKGEVTATKNEFNPENNDNSQIPADKLCEYTRSFRQFYTYFTGFNENRQNVYDISGKKSTSILNRIFNDNFFFHLDNITKWEKVKENLKNENISLVLKEMSYDWKKELSEIEKNLNCSFDEALSVESFVKFMNQSGIERYNILIGGNPALDGSRKIQGLNEFINITRQKAGAKRAQFPPMQELYKQILSKSDKTFIPEFSDDKDMFVSIKSFNENSFSGSSFIDEFIKINSELQNELQNERSNLYLSKEKITSISNKITGNWNNLNYELLEQLGENIFNSRKWFSFEEIEKAVTDGKIGERFILSNTYSNSLLSFFDNEFKTLAAKAQTFWTELEKTGLLNEEKIDSNRSNEGDKGFEQIATIKKFLDSLIELSGFVRDWQTSKEILNIETRNKDWYEHLDNFVNQFRIIPLYNMVRNHLTKKPVSKEKMKINFENSTLLAGWDKNKESDNYCILLEKDGLYFLGVMTPESNRIFDYEKNERTRKIVLAENSERCYRKINYKQIASVSKDIFTLCWDENSQSAIRKTKGREEVWGERITKIKDEKLYNESLEDKEYYFSYLIKCAKSYWKYFNLSLKKPSEYKNLSELFAEIERQGYSITFDNIKEKYIHEKIENGELYFFQIYSKDFSQNKKQKGTDNIHTVYWKGLFSPENLKNPVLKLNGQAEIFFRKASLKYDPEKMEKGHHHEKLKGKFSYPVIKDKRFTQNKFFFHCPVTLNFGAPSSPYKFNDSVRSFLKNNPDINIIGIDRGEKHLLYYSVVNQRGKIIEQGSINSIDNGFVPKGEAEVRKIDYHSKLDKIESNRDKARKSWSTIENIKELKAGYLSQVVHKLSELIIEHNAVVVLEDLNYGFKRGRFGVEKQIYQKFEKALIDKLNHLVFKKESSEKPGGYLNAYQLTNKFESFQKMGKQSGILFYTTASYTSTTDPVTGFLKNLYPSYQNVEKSIEFWKSFDSVKYNSAKDRFEFTYTIGKVPTKNMYKEKDEDKVDKKQWTVCSCVTRSRYVKALENQTDEQKQNTSSEQIGNKGRHETFFVTDEIKKVLDGSGIDYKSSSDLKAKFLEQDTKKFHSSMIYLFNAIMTMRVTDSGKEKGTKENDFIQSPVEPFFDSRYAKEDQPENGDANGAYNIARKGLCILQNINKADDVSKADIAISKQQWQNFVQKH

SEQ ID NO: 6516 - protein, 1185 aa, unidentified
  source 1..1185: note = MG29-193 effector
MESLTNLYPVSKTLRFSLIPQNETLHNIEKAGILTEDEKLAEDFKKVKKIADDWLKNFINESLTGASLNLEDLLIFEEKYNLFPRNEKDEEEFINIKTKLRKEIVSYLTKNPKFKLLGTADLIRKELPEFVKTEEEKDIINKFKNFTTYFTNYNQTRKNIYSDEEKHASYAYRIIHENLPLFIINKKNFNTIKTSYPELINDIKKTTEPLLDNTKIEDMFSIEWFSNTLTQPGIDLYNKMIGGESLENGKKIQGFNEKVNLFRQANKLDGKSVPMIKQLRKQILGDKNTPEWITEGFKDKNSMNEAIVKFIKNTEHAKNNLINKLFIKNKPYDYNKIFIKNRFIANISHELFKDWNLLKNNMLEQYKSKNPKSKNPEKEFAKIPYFSIAEIQKSIPNQNKHFPDFIIDHFHDKIMTLIPTEKKIHELWKDNKDSIPALKNLMDYYLELYRISKPFDVDCADKDPVFYELFDEIFNDFSKVVKLYNEVRNFITKKPYSLEKIKLNFGNSTLLSGWDVNKETDNTAVLLQKNGNYYLAIMNKDHNKIFKNTPVTKNEKNSYKKMEYKLLPKSYMMLPKVFFTKGNKDKYEPSEEIIRIYEEKTFKTGNNFNINDLHKLIDFYKESIKKNPEWSCYNFNFKPTKEYQKINEFYEETDTQGYNITFKNIPAEYIDNLVKKGQLYLFKIYSKDFSSYSKGTPNLHTLYFKMLFDDRNLKNTVYKLNGGAEIFYRKKSVTYPKNIMEKGHHAEDLKGKFNYPIIKDRRFTFDKFQFNISITLNPNAQGHGNINDICRNLIKSNNTNIIGIHRAENHLIYITVLNSSGDIIEQRSLNEIKSYGDKTVNYMEKLTERGKERNDARINWETIGNIKELKEGYLSNVISEIANMMIKYDAICVMEDLNYDFIRERSAIEKQIYQKFEKMLIDKLNFYVDKKKSPEETSGILKPLQLANKFTTFEKIGKESGMIFYVSPYKITDIDPVTGFVNLFDTRYFNIEKAIQFFDKFDDIYYNAKTDLFGFNFDYDNFINKEKIQNTKTKWTVYSYGERIERFNTNNIPKFKKIDLTKEFKNLFSEYSINYNSNLKKSIISLKDKNFFMKLLSLFRLTVQMRNGDFIISPVNDNLGNFFDSRNSDNKTLPENTAANGAYNIARKGLILLNRIKQTSDIRKTNLKISGDEWLQYTQNKNSYI

SEQ ID NO: 6517 - protein, 1260 aa, unidentified
  source 1..1260: note = MG29-194 effector
MKNFTNIYPQSKTLKFELRPYGATLDNIHKSGLIDQDETLKADYHAVKKMIDEYHKVVIDESLTNFKLTDLPAYEELYYKSRTEVEDKEFEIIQSNLRKQIHKAFSENKRFKSIFKKELIQKDLPAFVKKEEEREQISRFYHFTTYFTGFHENRKNIYTAEAKATSVCNRLIHENLPKFLDNRKTYLNYISNFIDLDLSQVEEDLQEVLGDITVDDLFSLDSFNHTLTQRDIDIYNLALCGRSIEGEKKIQGINECINIYRQKNRLKARQLPNIKPLYKQILSESKSGSFLLDKFEKDEDLFDSLRNFYHCLNSFNYKGEQDKSTFIELMTLFGRFSESDMTRVYLRNDASLSRLSKKLFGDWSLIVSALKYYYDAEANPLMGKKATNKYIKEKENWLNKSSNFSIDVINKSLLRYGTINETVNSQFTDDMIFEHFSSFMIEEKNLLNTVAENYMLVSEVLSRGSLDKNQNKKKKEIKTIKTFLDTVLDLLHFIKPLSVQYVGAEKDEGFYSDFDVLYDQLSQVIPVYNKTRYYLTKKPYSMEKFKMNFKNNTLLDGWDVNKETANKGILLQKEGLFYLAIMNKDHSKSFYNIMDTGDTTGYQKMNYKLLPGPNKMLPKVFFGVKNLNFFNPSDEVLRIRNTSSHSKNGNPQEGFEKADFSLSDCHSLIDFFKASLNKHKDWKKFAFDFSPTQSYNDISEFYREVENQGYKITYTNISDAYIHELVKEGKIYFFQIYNKDFSPFSKGKPNLHTLYWRALFDEKNLADVVYKLNGQAEVFYRKKSIEYSEEKWIQGHHHEQLKDGFAYPIIKDKRFAFDKFQFHVPITMNFKALGAPVINMKVREYLKTNPDVKIIGLDRGERHLLYLTLIDQNGNIEEQYSLNEIVNSYNGKVYKKDYQQLLHVKEGDRKKAKKNWETIEAIKELKEGYLSHVVHKIVNMMVEHNAIVVMEDLNFGFKRGRFHIEKQIYQKFEKMLIDKLNYLVLKDTQDPKTPTGLLNALQLSNKFESFQKLGKQSGFIFYLPAYLTSKIDPTTGFVNQLRIKYDSIVKSQAYYRQFDTIVYNNTSDWFEFSFRYVNFANTTPSARKIPWTICTTHHPRYAWNINSNVGNGGTEEYNVTKELKKLFDQHKIAYEEGTDLIESIASNTAVDFFKRLNKLLYITASLRHNNGKKGKEEHDFILSPVANSEGGFFNSLEADETQPENADANGAYHIALKGLWALQSIRKTDTDRLSKLNLAVSNEEWLNFAQAKQYRSQNSS

SEQ ID NO: 6518 - protein, 824 aa, unidentified
  source 1..824: note = MG29-195 effector
MFTNDYFSFTLIQTYIDIYNTMLGGKTLADGTKIQGLNELINLYRQKHNIDKRELPNLKPLYKQILSDRDGMSWIPEAFECREDLNLAIQTFYNKNIVAFECCDGVVDITEKFLEVLTQTSSYDREKIFIKNDLSLTAISHVLCEDYRVIKDALWQKHLQENPKAIKSKDIAGDEERFFGRKNSYFSISEIAKALDLIEKPSDLFGYFKTEVEKQSKQVKSSFKEWELDPNNKKLTKEFLDSTLDLQRTLKPLYVRSDIDKDIAFYALFDGYFDSLSAIVKLYDKVRNFESKKPYSTEKFKLNFENKGAFLGGWVDSYTDKSDNGTQSGGYLFRKKNAIGEYDYYLGISKDTKLFRSHLQNDIDENDISEYERLDYYQLKTASVFGNSYVDGSYSEDKIEIKNSIYNFVKSTDLGKELEDYISSKEAKEATPNGMINYIKEKNPTLFEELLEDEEFSKINKTVTKKLKETILSLHRVPKSQEYKEASFNLFTEPIEAIEKLSEEKTFVYFSISSREFENALANKDKPLLLFKITNKDLSYAETFLNGKRKSRGLDNLHTLYFKALMSGEQAVFDIGTGEVFYRKKSIEYSEEKMQKGHHYDKLKEKFSYPIIKDRRYTIDKFKFHLSIIQNYKQPDKYPMFNDTVNSFVKSHHKDIKIIGIDRGERHLLYLSLIDGKGAIVEQFSLNTILNTHSNKPIDYHDKLDKKEKARAQARENWGVVENIKELKEGYMSHVIHLIAKLIVEHNAIVVLEDLNFGFKRGRFKVEKQVYQKFEKMLIDKLNFLVDKQKSPHEIGGVLNALQLTNKFVSFEKLGKQSGFLYYV

SEQ ID NO: 6519 - protein, 1328 aa, unidentified
  source 1..1328: note = MG29-196 effector
MEEIFTEITNKNAFSLQKTLRFELKPMVLNEEENQLQPISESDSYLKNFNSGYLEKLKQIIKHDEERAEDYQEIKVYIDELHKQFIDRVLPEIKSLEIDFKKAFEMYELTKKRYAKSSSDKEEEEQSKEKKNNLKAWQDFQKEARKKISNFLKKQPEYENLFEKELFSDLIPKSNYSKQLGEKSPNDLAKSFSGFTTYFQGFHENRKNIYADEGSTSLAHRIINENLPKFFTNILQYVILNKDHNLLVGQFKENYSDEELTELFNPNSFVSFLNQSGVDRYNEIIEAKKGIETAKSKDGLKQLANKYKQAKQIKNLPNFTPLYDQILGKRGLDQNDESILRAGVTDDKNLLNSLKDFNKNIQPSVFELINICSELNKANAEEIFIMGSSLESLSSSVFGDYSVLSRVMKHHYIESRISASRTTEKKLEKDSEAYLKQETYSLQEIQSAIDYYIEKGNELESKSLFDYFTACKYNSNHTLSEEIKIAWDNLQPILELEQIDKDRAIPKTQEEQGGKGFQQVEKIKLFLDSYMQLLHFAKPLHLVKKRNPVTISKKDEAFYAIFDKNYTNLEAELIPVYNQTRNYLTKKPYSLEKFKINFEKGTLLNGWDLNKEKDNLGVLFLKNNNYYLGIMSNNKIFDFQKQNIKKEALSLSGQQDGYHKVIYKYLAGPNKMLPKVFFAKSNLEKFSASEEILRIRNTSSFTKNGEPQPSYKKAEFNLNDCHAMIDFYKQSLASHEDWSQFGFQFLETSQYSDISQFYEDVAKGGYKISFVNISDNYINEKVKAADLFLFQIYNKDFSEQKKGKDGKPNLHTMYWNAAFRPWLDRSESNVKLNGEAEIFFREHSIERKITHRSGESIDKKNPNNSGKSLFSYDLIKDKRFTSDKFFFHVPITINYKNKKERNNKQFNDVVNSVIKNNRDVNIIGIDRGERNLLYYTVIDQDGRILEQNSFNEISSQCSTSEKSSTFDYHKKLDEKEDERKQARKSWGTIENIKELKSGYLSHVIHKLAKLILKYNAVVCLEDLNAGFKRGRMKIEKQVYQKFELALIHKLNCLVLKDREEGEFGSYTNPYQLSSKITSYQDIFSQTGIVFYVNPAYTSKICPKTGFVNFLDLRYENLEKAQSLMGSFNSIRFNNHENYFEFDLDYKKIPQTQNKECGEKTQWTVGTYGNERFSYNPKTKGYDTYNVTEKLAHLFKKHNIGYEDGSDLREKILASTQDAVSFFKELLFLLRLTMSLRHVNENHDCILSPIKHPELGFFDSRDVKDSIEAEEPRDADANGAYHIAMKGLQIFAEKISSENPKLSIKKEDWFRFIQNHHESKWKEKSLSPI

SEQ ID NO: 6520 - protein, 828 aa, unidentified
  source 1..828: note = MG29-197 effector
GFTFCLNQKGIDTYNLILGGKSLEDGTKIQGLNEFINLYRQQKNLERKSLPNVKVLFKQILSDREKKSFVPEAFRSDQHLLNSILDYSNAGIFNWENDDKKKNIVKEIQKFLSNIKSNELDKIYITNDLSLTNISSHLLEDWNFIKRSLSYYYDENIGNKAKKEKSPTKYEEEREKWLKQKYFSIELLNNSISLYSTFLGEKKFNLTIESYFSKFTSKDEMKKEFNLLERLESTYQELKPLLENEYKKENLKANKGDVEKIKNYLDSIKSLQFFMKPLLPKNIQDEKDNDFYNQLEEYLEVINEITPLYNKVRNYLTGKVYSEEKFKLNFENSTLLDGWDENKESANLCVMFRDEDKFYLGIMNKEHNKIFSDIPKLKSGETYYEKMVYKLLPGPNKMLPKVFFSKSKIDFFKPSKTILKIKETESFIKGDNFKIQDCHALIDFYKDSISKHEDWSKFDFQFSKTSSYEDISGFYREVESQGYKITFNKIAKSYVDTLVAEGKLYLFQIYNKDFSKFSKGKPNLHTIYFKSLFDKENLKDVVMKLNGEAEIFYRKKSINYDEKTKKEGHHAKELKGKFNYPILKDKRYSEDKFQFHFPITLNFKAKEKFNFNQKVREFLKGNKDVNIIGIDRGERHLLYLVMINQEGKILKQVSLNSIQTEKKFPEVNYKDKLTEKEIERDKARKSWGTVENIKELKEGYLSQVVHQISKLMVENNAIVVLEDLNMGFKRGRQKVERQVYQKFEKMLIDKLNFLIFKENKSKEAGGVLNAYQLTDKFESFDSIGKQTGFLFYFPAWNTSKIDPKTGFVNFLHPVYESLDQAKKFISKI

SEQ ID NO: 6521 - protein, 1142 aa, unidentified
  source 1..1142: note = MG29-198 effector
MNENRKNMYSSEDQSTAISYRLMNENLPRFFKSCVSYDKMVAKCPNLNLHIEPTLLKELKELKINRIDEVFQPRFFMNLLTQQGIADFNELRGGHTTKDRDKPQGFNEQINLYRQQNPEQAKGVPFFEKLYKQILSKEETSSFVLDAFIDDQQLLNALAEFIKLAMNEKGFIKDLQEALQRLGAAHFEKTYVLGSGLTNVSKVLFAGDWNLINRALEAQDRALEAQAEKEHPQKGKKISDTLTKKREKFCNQDVFSLAELDSLLANYLEQQEKINNEGTAQTQKEWQDTKKNWLVKESITPLSDYFKKSVINAETTATLTKQITATKALFKLEALDQNRSTPKTDQDTGGKGFQQVQQIKAMLEAFNNILHSLKPLHLVKGRNPIAPNDVDTSFYSVFEETFESYSNNLVPLYNKTRNHLTKKPYQTEKFKLTFSNPTLLDGWDVNKETDNLSVILRKDGLYYLAIMHSEHRKIFEQAQEAGVGEDCYEKVNYKLLPGPNKMLPKVFFSKKGIEQYAPPAEILRLYKNEEHKKGETFKLDSCHKLIDFFKANISHYKKDANDVGWAVFEFQFSPTKNYEDISAFYKEIERQGYKIWFTNIASKYISDAVTAGKLFLFKIYNKDFSLHSKGAKNLHTLYWQGLFEQNNLKDVVLKLNGEAELFYRKRSIETGNQIIHLANQPIKNKTKQAKQGSSKFKYDIIKDKRYTQDKFQFHVPITLNFKSTNVKQFNHNINTAIQHDESVNIIGIDRGEHHLLYYSVIDQNGTIIEQDTLNTIDTGGKGYIVDYKDKLHSKEQERDNARKSWGMIENIKELKAGYLSQVVHKLAKLIIERNAIVCLEDLNFGFKRGRFGIEKQVYQKFERALIEKLNYLVFKDTERSDEAGHYLNAYQLTAPFDSFKKLGKQSGILYYVPAAYTSKIDPATGFINFLNTRYETIQKAQDFFSKMDKICYNAKENYFEFHFDYNKFEVNQDLTAYQTKWIACTHGGDNRYHYNVKQRTLDKINVTDKLESLLQQYKIQYKHGEDIKEVIGKIDKADFFKTLLWLLRLTLTLRHSDRNNDEDYILSPVKDKNGVFFDSREQATLPSDKQTLPIDSDANGAYHIALKGLWNLQQINDWDSTGKLNLAMSYNDWFKFVRQLKQ

SEQ ID NO: 6522 - protein, 1199 aa, unidentified
  source 1..1199: note = MG29-199 effector
MLSNFTNQYQLSKTLRFELKPIGNTLEHIKQKGLLSQDEQRAENYTVIKEVIDTYHKAFIEESLASVVFDNLERFEELYLKSNKDEKEQKEFEKLQENLRKEIVKNFKVHPKWNNLFKKELIKEDLLAFEQITDEQKEVVKEFTNFTTYFTGFHENRANMYTDKEQHSSIAYRIVHDNLPTFVNNKKAFESILQKYPQLISDAKSSIEEELLGAVFEDMFLLQYFNHLPSQTHIDLYNTMLGGVKRDDLKIQGFNEKINLYRQANGLNKKELPNLKPLYKQILSDKDTLSWLPEAFETQEELVGAVESFYQEKILAFECCDGRVNLLEKFKEIFSQTQLYDTSKIFIKSDKPLTDISQALFKNYGLLKEALWQKHLDDNPKLQKSKKIEESEEKFFKQKYFTLSSLQEAIEFAKLSANVWNYFQENLDTYIKQIEENHTIWETDKTNTATTKSFLDSLINLQRFLKPLNVQTDSDKDIAFYSTFDSYFEALTQIVKLYDKVRNFKTKKPYSLEKFKLNFENSTLLDGWDVNKEPDNTSILLRKNNLYYLAIMDKKYNKLFCNLEKSTQSDVYEKIEYKLLPGANKMLPKVFFSNKNIDYYNPSKKLLENYKDGIHKKGDNFDIDFCHELIDFFKVSIQKHEDWKHFKFNFSPTKSYEDLSGFYREVEQQGYKISYKNIDTKLVESWVNDGKLYLFQIYNKDFSPYSKGTPNMHTLYWKALFDEQNLANVVYKLNGQAEIFYRKKSIEYTEDKLKKGHHHEELKDKFAYPIIKDRRFAFDKFQFHVPITLNFKAEGNENLNQKTIEYIKTNDIKIIGIDRGERHLLYLSLIDLNGRIVEQYSLNQIINSYNGKEYPIDYHEKLAKKEDERALAREEWGVIENIKELKEGYMSHVIHRITTLMVEHNAIVVLEDLNFGFKQGRFKVEKQVYQKFEKALIDKLNYLVDKKKTPSDLGGVLNALQLTNKFVSFEKMGKQNGFLFYVPAWNTSKIDPVTGFVNLFDTRCSSVEKAKEFFGKFKSIRYNSVKEYFEFEFDYNDFHNKALDTQTQWTICTYGERIKTFRNKDKNSQWDNETIHLTTAFKNHFGNYQGELKEYILAQDKKEFFEQLLDLFKLTLQMRNSITNSEVDYLISPVADKNGNFYDSRKADSSLPKDADANGAYNIARKGLMLVERIKESTDVKKVDFKLTNKEWLQFAQRG

SEQ ID NO: 6523 - protein, 754 aa, unidentified
  source 1..754: note = MG29-200 effector
TSLNEIFSLGYFNKILNQTGIDLYNFVLGGKSEKDQKKIKGINEYINLYNQQQTDRKQRIPKLKPLYKQILSDRNSLSFLAEQFENDNELLEAIEQFRQTGLLHYKTDLKEINVLNEWKTLIENLNDFQREGVYVNNGIVLTDISQQLFGSWEYLKKALVYYYENVLFTDEKEKKKKKYNEAKEKWLKQKQFSIAVLEDALAAFKKQETNPEILEKFTEHPVIDYFKKAGNDGNGDLPEKIDATYNTVKDLLNTSLQPNEKLVQQKDKTLLIKNYLDSIVNLLHFIKSLKPREELSQKDEAFYGRFDELYEALNVITPLYNKVRNHLTKKPYSTEKYKLNFENSTLADGWDLNKEADNTTILLRKEGNYYVAVMDKKHNKIFRDIPASAKGEAVYEKMVYKLLPGANKMLPKVFFSKSRIEEFNPSTELLENYKNETHKKGESFNIQHCYNLINFFKSSICQHEDWKHFNFNFSETGTYEDLSGFYREVEHQGYKITFVNISESYIHKLVEEGKLYLFQLYNKDFSKYSKGKPNLHTLYWKMLFDETNLKDVVYKLNGEAEVFYRKKSIEDKNKIIHKANQPISNKNPENVKKQSSFQYDITKDHRFTKDKFQFHVPITMNFKAKGILNVNNEANKYLRNNPDTHIIGIDRGERHLLYLTLINQQGEIIKQESLNIVANEKQKTDYHKLLEAKEGKRDEARRDWGTIENIKELKEGYLSQVVHKIAEMIVDYNAIVVMEDLNFGFKRGRQKVEK

SEQ ID NO: 6524 - protein, 1214 aa, unidentified
  source 1..1214: note = MG29-201 effector
MHLQLTNQFSVQKTLRFELKPIGKTLEHIEAKGLIKEDEQRAQEYERLKKIIDFYHKDFISEALSSVRLKGLRCYERLFFDSARDEKVFEKIQTKMRKQMRKAFEEHPNWKYLFKKELLTKVLPNWEHPEVTSEDKNIIKNFQKFTTYLTGFHENRKNIYSNEAKHTAIAYRVVHENLPVFLQNKRLFELIKERYSKIIEDAKKELNTQDALKGATVEDVFSLDYYQYLMSQTHIDIYNAIIGGIVLDDGTKVQGLNEKINLHRKNGLSKRDLPNMKPLYKQILSDREALSWLPESFEDTQEMSEAIAAYYDANILRFKCCDGEVNLLEKFDKLFQESNEYDLNTVYIKNDKSLTDISQAIFGNYSTIKDALWEHHLRENPRIANASDIDEKRRKFFDKKKSYFSIAQIEEALKEYGEEISLFDYFKEFGTYGNDEARDLRVEIESAYEAWNNDRENKDKIKALLQSLLNLQHFLKPLYVKDELEKDIAFYAYFDIYYEALSLVIPLFNKVRNFLTKKPYSKEKFKLNFENSTLLDGWDVNKERDNLGVLFEKDGLFYLGIMDKKHNKIFQNIKEGGTHNVYRKIEYKLLPGPNKMLPKVFFSKRRIDEFAPSESLLAKYKEGTHKKGETFNLDDCHNLIDFFKASIKKHPDWREFEFDFTDTKKYQDISEFYKEVELQGYKIAFKNIDAQVIEQFVDEGKLYLFQIYNKDFSPYSKGTPNLHTIYWRMVFDDANLKDVVYKLNGEAEIFYRKRSIEYGEKTWKEGHHAKELKDKFNYPIIKDRRFALDKFQFHVPITLNFKASNLSNKEHNNLIRQKIKEHTDDIKIIGIDRGERHLLYLALIDGKGRIVEQYSLNTIVNSYNGKKHKVDYHQKLDAKEKEREEARLNWESIERIKELKEGYMSHVIHKIATLIVEHNAIVVLEDLNFGFKRGRFKVEKQVYQKFEKMLIDKLNYLVDKKKEPTELGGALKALQLTNKFISFEKMGKQNGILFYVPAWNTSKIDPTTGFVNLFDAKYYNKEKSREFFSKFKSINYNKQEDYFEFSFDYNDFHRKAEGTRTEWTLCSFGERIRTFRNPSKNNQWDDETIDLTKAFKELFNGQTENLQAYILMQDSVEFFKKLHYLFKLMLQMRNSSSKTGDDYLLSPVKNSSGEFFDSRKSDNSLPKDADANGAYNIARKGLMLVQRFKEADDVAKADLTITNKEWLRFAQGIE

SEQ ID NO: 6525 - protein, 808 aa, unidentified
  source 1..808: note = MG29-202 effector
NMQRVINEDRKRAEDFSKVKKIMDDFCRYLIQKHLSNVNLDINNLKLFEDSFLELKRKKNAAKKNDIANARTNLNKIIKELSNELYKKSNLDKIKFKVKEKKDDTESIYFVTALKEWLKENNREDDLALVKKFDKFNSYFYGFFENRKNIFNNTSSRNKSTSILYRAINENLPSFVNNCLKLEELIKLGVDFSEVERNFSKELQGKKLIDFIKLENYGSFLTQEGIDLFNVIVGGKTTENGEKLKGINEIINLESQNRADKNIRKLKLDVLKKQILSDSESKSYVPEKLKDDLEFVQNIQNAYMIDDFNRIKELYSNLDNYDLNEIYIKNDAIITKLSQELFGEFDLLQELIFDYVLKDENFKNKDQKYLKRKKEYFKKQDYFSIFDLESAIKYGFNNNDFFNNSEKKNKFLENINNDIDHPILGYFKRFYFENKNLFKEIDDSYKELNNILNSNNLVNKKDFLTQGKEEDVRKIKCFLDNCLNLLHFVKILNYKKGDPLDYETLIVDNSFYEKYFEIYDRLVEINKIYEKARNYATQKPYSKNKFKLNFDNSKLADGWDRNKETDYFTILLRKNNNFYLAILNRNNKKLFKKINYNENEDYYEKMEYKQIPFSKGGLGGFVRKCFNSAKKKGWVCPKDCLNSNGEIIINDNDVKNNLIQLIDCYKNFLNIYENSGFKYKDFNFEFKDSKDYSSLDEFFNDVEKKRYFIKFVKVSKKFIDDSVDAGKLYLFHIYNKDFSENKCDKNKNSIRNMHTLYWNATFSEENLKNPIFKLNGRAELFFRDKSTANNLIIHPKLKPIKNKDPINN

SEQ ID NO: 6526 - protein, 914 aa, unidentified
  source 1..914: note = MG29-203 effector
MKSTLDQFSHLYPMSKTLRFELIPQGATTANIESRGFLKKDEERAESYKKMKETIDRFHQDFIEKAMAHVRLSNLEDFENLYNAPNEEKKEDKYKKQLEKVQERLRKEIAKGFKSGEVKAIFLKIDKKDLVTKLLEKWIEENNLEDVHFDPEFKKFTTYFSGFHQNRKNMYTDKAQSTAIAYRLVHENLPKFIDNINIFKKVSEIPELKQNLEKLYKEIEEYLGIVSIEEAFELGYFNEVLSQKGIDVYNLILGGRSEKENKKKIQGLNEHINLYNQKQDKKNKIPKLKVLYKQILSDRTSTSFLPDAFEDDDNSTASQKVLAAIHQFYHTQLLDYQPSDKAETINVLKSFQGLLADINNFDLDKVYLRNDKSISTIAQKMAGNYGVLRDALNYYYENKIDPEFQIKYDKATTDKKRENLDKEKSKFTRQSYISISTLQTALDTYVESFDETHDVKQVYSPTCIADYFKDHFKAEPKEGSDKEFDFVSNIEAKLSTIKGLLNTPYPENERLQQDKKKIDAIKLFLDSIMEYLHFIKPLALPEDFTLEKDEHFYTLFEEWYEQMQLLIPLYNKVRNYATQKPYSTEKFKLNFENSSFLSGWAPDYNTKGGLIIKKQDNFYLCIVEKKLKKEDVEFLKTSPEDHLAHRVIYDFQKPDNKNVPRIFIRSKGTSFAPAVQKYDLPVESIIHIYDEGLYKTDFKKENPAVFKKSLVQLIDYFKLGFSRHDSYKHYDFEWKESEEYETIADFYQDVINSCYELRDEAINFDHLHQLIDQGKLYLFQIYNKDFSKHSKGKPNLHTMYWKALFEKQNLKDVVYKLNGEAEMFYRKKSIQDKNRVVHKKNIKVARKFYKDDKKTERVPDETVLRLNKFYKGQIQESGLKKEDLKFKDNYSLFHEQGKDIDLIKDKRYTVDKFQ

SEQ ID NO: 6527 - protein, 738 aa, unidentified
  source 1..738: note = MG29-204 effector
ISDKDGHFYNNFLVYYKSIKEIIPLRHKVQSYVTQKPYSLKKFKVNFDNSYFLTTWPFSYENKGGVIIRKEDLFYLAIINCSVKDLANYKLNDCSIANSAERIIIDTQKPDNKNIPRLFIRSKGDSFAPAVTEYDLPINDIIDIYDNGKFKTEHKKLDPEEFKSSLTALIEYFKLGLSRHNSYKHYKYQWKPSDCYNDISEFYNDTVNSCYQIKTEKINFDKILELVSEGKVYLFKIYNKDFSPNSKGQPNLHTMYWRALFDENNLKNVIYKLHGGAEIFFREKSISKENEIVHYANQPIKNKNPHAIKREVILPYDVIKDKRFCIDKFQLHIPITLNFKATGKGQLNSDVLQYLKDTPQNQVKVIGIDRGERHLLYLTMIDHEGHIIMQESLNTVKSDNYPIETQYHDLLAQKEEDRNKARSNWDSIENIKELKEGYLSQVVHKLAKLIVENNAVLVMEDLNIGFKRGRFKVEKQVYQKFEKALIDKLNYLVFKDKKVEEEGGLFKALQLTEPYTDFLKYKKKQCGFLFYVQAWNTSKIDPTTGFIDMLKPKYKNIPEAQEFFRKFISIKYNSDKDYFEFYFDYRNFPRSIDSHKNDWTVCTYGKERYAWNRSLNQGKGDYEIWNVTEKIKELFNIEGIEYRSGRNLTEAIANSESKSLLSMLMKSLSVVLAMRYSSSKDNRDFILSPVANDKGVFYYSEEADQYLPKDADANGAYNIARKGLLLLDRIRSSADLKS

SEQ ID NO: 6528 - protein, 979 aa, unidentified
  source 1..979: note = MG29-205 effector
DRETSSFIPDQFENDKELLESLGKFINEMAKKGGILENLQNSVRSLKDADMRKTFVKGGVEITRISEKIFGNYSILKSAIYHHAETVVYPTPKSGKVSETLEDKRKKYVNKQDVFSITELESMLSIYANHLDDDSPDKETIIKYTNVKNIISNHFLSTIDDLINDEAIGFRTAVEEVLSLLSLDRLNKGKQGQEQTHKIQKMLDAFLAMSHSVKPLHLVSRRKPIDVPDMDMGFYNNFSKTFEAFDQMVIALYNKTRNHLTKKPYSKDKIKVNFENPTLLDGWDINKAKANNSTILRKDGLYYLAIMHSNYNSIFDEIPDVKNHERVYEKVNYKLISGINKMLPKVFFSKKGIETFNPPRSILDLYKNSEHKNGDTFNLDSCHRLIDFFKENVGKYKVNPTDEFGWDVFNFKFSPTKSYQDISYFYREIEMQAYKIWFADISETYINQCIEEGKLFLFQIYNKDFSPYSTGTPNLHTLYWKALFESENLKDVVAKLNGQAEIFYRKHSIKKDERTIHNANQVIQNKNENNPKKTSSFEYDIIKDKRYTVDKFHFHVPITLNFKAPGVTRFNNKINDTLAKSDDTYIIGIDRGERHLLYYTVLSSKCEIVEQGTLNTVSTNHGYKVDYQKKLDKKEKERDKARKAWTSIENIKELKAGDLSHVIHKLSQLFIKYNAIVCLEDLNFGFKRGRFKVEKQVYQKFEKALIDKLNYLVFKDVKFGKPGHYLNAYQLTAPFDSFKKLGKQTGILYYVQASYTSKIDPVTGFINFLYPRYESFLKSKMFFENMNGIRYNAEKDYFEFMIDYSIMTPSRDLSGYKNKWTICTFGDKRFKNFRNANENWESVVVNVTAELKQLLEQAGITFQLGQDLRESITQIKDTKFYRKLFKLLQVTLSLRHSKTGTDEDFILSPVADENGKFFDSRKATEKQPKDADANGAFHIALKGLWNIQKIKEWDGTSNLNLAMKNVEWFSFAYNKPFLD

SEQ ID NO: 6529 - protein, 1024 aa, unidentified
  source 1..1024: note = MG29-206 effector
MFSYGLYKEEGKKKIQGLNEYINLYNQKQEKKNRIPKLKPLYKQILSDRENISFLPELFEESQDVLDAIESYYKANLVDYKPDDKDDTENILKELYSLLKGVNSFDTNKIYIRNDKSLTDISKAIFGDWAIIDAALEFEYIQDITIPKSGLTKKQEKEKERYLKQPYFTIQEIEQALKAYRNENEVLADFTEGMVGNYFYSHFKTKTDSDKEFDFVSNIEAKYSCIKGVLNTKYPKNQKLNQDKVTVNNIKVFLDSLMELLHFIKPLALPNDVPFDKDETFYGHFETYYEQLQLLIPLYNKVRNYATQKAYSKEKFKLNFENSTLLDGWDVNKEEANSCVLFQKEGLYYLGIMDKNHNKVFRNLPSTSSKNTYNKINYKLLPGASKMLPKVFFSSKNIAYYNPDKEILRIRNHSTHTKGGSPQKGYEKQDFNVKDCRKMIDFFKTSIHKHPDWKKFGFEFSETAHYNSIDTFYREVESQGYTITHTAIDNDYIDKLVNEGKLYLFQIYNKYFSPYSKGKPNMHTLYWKALFEPDNLNDVVYKLNGQAEVFYRKKSIKEKHKVIHKAQEPIINKNPLAQKKTSVFDYDIIKDKRYTVDKFQFHVPITLNFKAVGNEYLNTNVLDYLRDNSDVKIIGLDRGERHLIYLSVIDQEGNILEQESLNTIINKEHNIHTPYHKLLDKREKERDSSRKEWGTIATIKELKEGYISQVVHRITQLMVKHNAIVVMEDLNFGFKRGRFKVEKQVYQKLEKMLIEKLNYLVFKDKLPNEAGGLYNALQLTNKFKSFKEMGKQNGFLFYVPAWNTSKIDPTTGFVNLFYTRYESVEKAQQFFSSFDSIKYNTKKGYFEFAFDYNNFTTRGEGTKTKWTVCTYGDRIITFRNPNANNQWDNKEVNLTQQFEDFLGKHQIVYGDGQCIKDQIVGQVDKTFFKDLLYLIKLTVQMRNSITNSDVDYLISPVTNHSGTFYDSRKASNSLPKDADANGAYHIAKKGLQWVQQVQQFEGDDWKNLNLDKTNKGWLRFVQNQ

SEQ ID NO: 6530 - protein, 1315 aa, unidentified
  source 1..1315: note = MG29-207 effector
METKKSIFDEFTNLYSLRKTLRFELIPQGRTLEYINKKGLISKDEQLAQSYQRMKKTIDGFHKYFIDLALSKTKLTRLKEFEELYSADAEKKKEESFKKEFGKVKEILRKEIVSSFESGEAGKTFSKLTKADLLKGKNKNSDETEDGDGSDENTGNKHTELKGLIEEWMEKQPNKDEIYFDKEFKKFTTYFSGFHTNRKNMYSDEDNSTAIAYRLIHENLPKFIDNIRTFGIIKNKIGLYEDCNKLHNELSKYLNIENIDEVFKLDHYNTVLTQKQIDGYNLIISGISVKEGKKIQGLNEYINLYNQKQTDKKNKVPKIKLLYKQILSDKESVSFLPDNFEDDSNRTASQKVLDAINEYYHSNIITFQQIGASHPENVLIKLKELLQELKEYDLNKIYIKNDSNLTLISNKLFGNRNVFDLALNYYYEFVERPNFNNEYQKAKESKREKLNKDKEKFVKASNVSFLLLQSALNEYVQRLDSSHEIKKKYSDSCITNWFIDYFKTESKDCVEKELIKNVEEKYNAIKGILNIKYPSDKKLYQEKDNISVIKTFLDSLMEFLHFVKPIVLDKDSSLEKDNSFYAQFDLYYEELNKIIPLYNKVRNYATQKSYNVGKIKLNFENGTLAAGWDKNKETDNTTVIFRKDSLYYLGILDVNNKQVFKKQFLKSNGESVFEKMEYKLLPGANKMLPKVFFSKKNLKKFNPTKDLLIKYKNGIHKKGDNFNLDFCHELIDFFKKSISIHNDWKHFNHKFSPTFEYKDISDFYREVEQQGYKITFQNIPEAYISSLVSEGKLYLFQIYNKDFSQNKKAKGTDNLHTLYWKALFDEGNLKNVVYKLNGEAELFYRKRSLNYSEEIMKKGHHSEMLKNKFNYPIISNKRFASDKFQFHVPITLNFKSSGFKNINLSVLNFLKNNPKINIIGIDRGERHLIYITIIDQEGNIKLQKSFNELFYNVKGESQSRKVDYREKLDKREDERKEAREKWGVIESIKELKQGYLSIVVHEIVKLMVKYNAILVMEDLNFGFKRGRFKIEKQVYQKLEKALIDKLNYLVFKDNDAFEFGGIYKALQLTSRFESFKKLGKQSGFLFYVPAWNTSKIDPNTGFVNLFKTTYESIEKAKEFFNSFDAIRFNKTNRYFEFVVEDYTKFNIKAEGTRNNWIICTKGDRIHIFKNKDKKDNWDSKIVNLTDRFKSIFKEQNIPFMDEENLIEEIISKDDISFFKNLLDLFRQTLQMRNSIPHKEMDYLVSPIADRNGKFYDSREATDEEPKNADANGAYNIARKGIILLNKIKDLENLKKPNLTISEKEWLKFAQKIGVK

SEQ ID NO: 6531 - protein, 738 aa, unidentified
  source 1..738: note = MG29-208 effector
MNQNKSIWNQFTNMYSISKTLRFELIPQGRTLENVKNKGLIQEDKEREKEFNKVKKVMDRYYKYFIEKALAQVSIDTEDLRKFQEYYEDLKKDRNNESLKKSYAEVQKKIRKSIYEKIKNMNEFDHIFKREFIQKILPKWLKENNEHDDACLVANFNKWATYFTGFFKNRKNVFSADEIATSIIFRIVNDNLPKYIDNLSRFNKLKSYNGASFEKLENDFKEELDERNLEDFFALKNFNHCLNQKGIDHYNLIVGGKTLEDGTKIKGLNEYINELSQKAENGREVRKLKMMPLFKQILSDRESASFLPEKFENDREVINSINEYYEHVLAQFPRLKKLLSEMPKKDINQIYMRNDRSLSEISQEIFKDYQIIKSGIREYGLKTLGIKDTKIDEWLKKQSYFSIAEIERGLTLLELENFSQENPILSYLIGLHKEGKDLIKEISEAAEAFKKIEGSEKKLLLKKDKEVEVIKGFLDSLKNLVHFMKPLYYDSRHNIDEKGKQALELDMDFYFHFNQIYEDLSKIIPLYNKVRNYVTQKPFSTKKFKLNFQCSSLLTGWFSDFRTNAGLILKKNNAYYLAIVPKKLDKVDRESLSILDNSESIKVLKYDFQKPDYKNIPRLFVRSKGSNFATAVKKYSLPINEIIEIYDNGYYKTEYREKDPQKFRESLKKLIDYFKEGFQKHESYKHYTFIWRDSEEYNSINEFYEDVINSCYSLSFYKVNYGYLNELVNQGKLYLFRI

SEQ ID NO: 6532 - protein, 1346 aa, unidentified
  source 1..1346: note = MG29-209 effector
MKNQHLFSGFTNQYAVSKTLKFALKPTDKTKEHINNKNDKGKNLLDVDKELAEKYKQAKKIIDEYHKSFIHEKLSNFSFGKKELQDFNNAYEDLKKDKKNDSLKKDLILKQDELRKQVAQELQKNNYLYKKKGGKAKFVKQRLPEWAVENANQIKKNHENIDNPEAIIKDFKNWTNYFGGFNDNRKNIYTEKSHSTSIGYRLIHENLPKFLENIKRYKEAKKLDIDFSEVEQKFDVNPDNIFTLNYFNQCLTQEDIEQYNLIRGGQSKVDNKKERGINEIINLYSHELQSKLTDAQDEDKKELKAQIKQVRSCKLEELYKQILSNRSQISFPLENIKNDSELCQQIEHLFYLNNRGSLIGKQEETGEIAEVIFDISEAIKKAIQAISDADPEQLYIKNKSSRAITDISQHLFGDWNLITKSLNYYAEQTIFSAPKDKKETAKQQEVREKKLENWMKNIPYFSFAEIHAALEYYFKQYSNKELQNEKTVKNEQSEQGITKEMKETALKKPLFTYFKELIITKKNEKDNTFEKIFLSEQIKTTYPIAKKVFEQYKDVKKELLKSKKDEVHNIKAYLDSLMDLLHFLKPLYVQFSKKEEKKQVEIFEKDNSFYGDFDVLFKVLNQIIPLYNQTRNYLTKKPFSIEKYKLNFENSQLADGWSKNKETNNTCVLLMKNEQYYLGVMNKKHNKLFSDELPNKGSCYQKIIYKQVSDAAKDIHTLVNIEGKVSRFTKGLNEKRSKYCQEIQNIKSQESYKGKGLIKSDLYKFIDYYKKCAKSYWNWCDFEFEKTEKYQNIKEFTDDINRQGYKITFCDISESYINQCVNEGKLYLFHIYSKDFSIHSKGRKNLQTLYWKALFDENNLKDVVYKLNGEAELFFRKASIQYSDDIWQKGHHYEELKGKFQKEGKHLPIIKDRRYAKDTYLFHVPITCNFKAEGVTKFNDYVNKEFLQKNSNVNILGIDRGERHLAYYTLINQNNEILKDKDGKYLQGSFNNPTGRKDYHELLNKREQERDKARKSWGTIEKIKDIKEGYLSQVVHKIATLMIEHNAIVVFEDLNFGFKKGRFKVEKQVYQKFEKMLIDKLNYLVFKDKSHDEPGGLLNAFQLTAPFESFQKLGKQTGFIFYVPAYHTSKICPATGFVNLLYPRYETVKKSQEFFDKFNKICFNKEENYFEFHFNYAKFTDKAKGSEQNWIVCSYGKRLENFKNPQQNNQWDTREIDLTQDLQKLFQKHNIQFDVDVCIINSICQQNDRQFFKDLIRLLRLTLQMRNSRINSDEDWMISPVKKNQDKFFDSRKVDDSMPQNADANGAYHIALKGLWCLQQINETDNTKNLKLAISNKEWLAFAQNK

SEQ ID NO: 6533 - protein, 758 aa, unidentified
  source 1..758: note = MG29-210 effector
SIIRAAIYNYAETVMYPTPKTGKVSDVLEEKRKKYANNEDIFSIAELESMLTSYREQLEDEHPDKEIITHCENSEHPIRTYFLNIIDNVKNDKDIELGKSIENVLPLLSLENLNKGKAGQTQTHLIQKMLDAFLAVTHAVKPLHLVKGRKPIEVPDIDMGFYADFSSAFEIYQQMIIGLYNKTRNHLTKKPFSTDKIKINFENPTLLDGWDANKENDNSGILFKKDGNYFLGIMHPKHKNIFNYIKGINDIESEKRSLSKDELFDKIVDGNSDHYQKIVYKLLPGVNKMLPKVFFSGRRIDYFAPSTEVLKIRNTASHSKNGKPQKGFEKADFNLKDCHTIIDFFKQSLEKHPEWKEFEFDFSPTSSYEDLSGFYREVEHQGYKMDFHPIKKSYIDQCIEDGKLFLFQIYNKDFSPYSKGKPNLHTLYWKALFDPENLKNVVAKLNGQAEIFYRKHSIIKDDRTIHRSNKSLQNKNENNPKKTSLFEYDIIKDKRYTVDKFQFHVPITLNFKAEGVTRFNDKINRELSKSDDTHIIGIDRGERHLLYYSVINHKGEIVEQETLNTISTDQGFAVDYQQKLDKKEKARDKARKSWSTVENIKELKAGYLSHVVHKLALLIVKYDAIICLEDLNFGFKRGRFKVEKQVYQKFEKALIDKLNYLVFKDAKPNEPGHVLNALQLTAPFDSFKKLGKQTGILYYVQAAYTSKIDPVTGFINFLYPKYESLIKSKTFFESMEGIRYNPNKDYFEFSFDYRKMTP

SEQ ID NO: 6534 - protein, 1192 aa, unidentified
  source 1..1192: note = MG29-211 effector
MIKKTLPEWLEEKNPEIEGVEDPQAIIKTFEKWTIYFRGFNENRQNFYTDQAKSTSISYRLIHENLPRFIDNIKRYKDAKALNVDFSEVEKSFAAKLDEVFSLEYYNHCLTQKGIDVYNQITGGRSEKGNVKKQGVNEKINLHAQKLKSKISNASDEGKKELEEKSKKVRSCKLEKLHKQILSDSSERSFRLDEIDSDSSLCEAIVSTFEIDDDENLIGKTKDGDFNITKNVEESLRSLKNSNPEKVYVNNRSITVISQNLFKSWNTINNCLEYYAENKRYPVPEGKKETKTLLDQREKWLKQSYFSFADIHKALETYFEQYAEDEFKNEQKHEEINDRLNIKEQKEIAKSKPLFGYFEGLIIRKKDEKNKIFEAKHLLEEIQRTFKEVPTILEEYRNVDEEKLKNEKGKVQKVKLYLDALMDLQNFLKPLFIQLNKKEEEKAIELYEKDTGFYEGFDSLFEVVKQIVPLYNRTRNYLTKKPYSVEKYKLNFENSTLADGWDKNKEKDNTCVLLMKDGQYFLGIMDMDKKHKKIFEGDLPDEGQCYKKIIYKQISDASKDIQNLICINGKFQRKTKKLDELKEKHIPDIAKIRSCQSYKTTNKNFNKEDLITFINYYKKAATKYWDWCDFSFRESDKYDSFKDFTDHVNSQGYKIDFQNISETYIDDCVKKGKLYLFQIYSKDFSPKSRGKPNLQTLYWKALFDEKNRRDIIYKLNGKAELFHRKKSIEYSQLIWDKGHHAGKIRQKYPIIKDRRYAQDTYLFHVSIQCNFKAGAKKPDDFNREVRDSLKDNSEVNIIGIDRGERHLAYYTIINQKGEILKNANGEYLQSSLNKPLGEKDYQALLHKREKERDDARKSWGTIERIKDLKEGYLSQVVHKIAKLMVEHKAVVVFEDLNFGFKRERFKVEKQVYQKLEKMLIDKLNYLVFKDKEPDETGGLLNALQLTAPVGSFRELGKQTGFVFYVPAYHTSKVCPATGFVNLLYPKYETVKKAREFFKKFNKICFNKNCFEFHFDYEKFTNKAEGSRQDWVLCSYGVRLENFKNKQNNQWDTREINLNDEIEKLFKDNSIDCNNGQCLIEKIVQQDKSEFFKSLLRLLRLTLQMRNSKIGTDEDWLISPVKGSKGNFFDSRKADVSMPQNADANGAYHIALKGLLMLEQLREREDVETFKPNLSNEKWYEFLAKRYENKSGN

SEQ ID NO: 6535 - protein, 742 aa, unidentified
  source 1..742: note = MG29-212 effector
KNFYNLYEKIKEIKRGKKERESELKKLNKEFSKKQKAFRKDLYDQIKRQENFQDLFKKELLTKVLIKWLNEKYADDPKEKENLYLVKKFTNWTTYFTGFNENRKNIYSDKEIHTSIIHRIVHVNLLKFLDNLSKFRFLKKQYLTDNKKLESVFGNIEDDLKEEFDGKKLDEIFSLSYFNFCLSQKGIDKYNTIIGGKKLENEIRKRQGVNESINLFSQNPEKYIRGEVQDRNTVKKGIKRLKMESLFKQILSDRESSSFVLDKFEDDKDVINSLNRFYKGICGGNAKEETNVFEQIREILSKLDEYYLENIYVKNKNSIRHLSKYLYGFYDSLTDALKCYAEKKLFPFKKKEIPTKKELKQIEDWIKKTPCFSIKQLQESIELYSKFFDKRAEGTVLSYFSDFKKHSGEQKKDILEEVQKKYEEVKNILDEDQIDGKKILIEKEDYIERIKAFLDSIFDVFNFIKPFQVSAEDKDGNFYSEFETIFERLEKIIPLYNKVRNYITQKPYSTEKFKLNFENSTLAKGWDLNKEKKNTTVLFKKHDLFYVGVMDKDHRKILENPPFSKENDSYYEKIVYKLLPGANKMLPKVFFSKKHLDYYSPSEEIIRIRNHSTYTKNGDPQEGYEKKDFILNDCHKMIDFFKKQIEKHPEWRNYNFKFSKTTSYGYIDEFYREVEIQGYKIDFKRIDEEYIEELINEGKLYLFKIWNKDFSKYSKGKKNLHTLYWNAVFDEKNLNDVVYKLN

SEQ ID NO: 6536 - protein, 904 aa, unidentified
  source 1..904: note = MG29-213 effector
MVPWKQYVVYGLKESGKRGIRKIGGKMAKMKSTWDEFTNMYSLSKTLRFELKPVGKTLEHIKEKRLISQDKERAENYKKMKKTIDEFHKDFIEIAMSQVKLTKLKEFANLYNASPERKKEDSFKKAFEKVRAELRKDIAKGFKTGEAKEIFSKIDKKDLITKLLEDWMKKRQENLYFDENFKTFTTYFGGFHENRKNMYTDKDQSTAIAYRLIHENLPKFLNNINTFKKLRDKPELHEECKILFKEIKDYLDISSIDDVFKLDYYNKVLTQKQIGVYNLIIGGRTAEEGKKKIQGMNEYINLYNQKQDKKDRIPKLKPLYKQILSDRESVSFLPEKFEDDPDSTASQKVLDAIREYYETNLIDFKPDGKDETENVLKKVKELLADIKAYDLSRIYVRNGKAISDISKALFGDWSIIKSALEFTYTRTIKVGKKGLSKKQEKDRERYLKQSHFSIDEIEKALFKYKNENEALKDLRENTTPIAVYFHTNFKAEKKEESDKEFDLIANIEAKYSCVKGILNTDYPKDKRLHQEKKTIDDIKAFLDSLMEFLHFVKPLSLPSDNPLEKDEIFYSQFQLWYDQLRLLIPLYNKVRNYATQKPYSIEKFKLNFENSTLLAGWDLNKEADNTSVLFRKNGLYYLGIMDKKHNRVFKNIPDANPGESAYEKMVYKLLPGANKMLPKVFFSNIRNEMFAPPEELKKKYEAETHKKSGKFNIEDCHTLIDFFKESIAKHEDWKHFGFQFSDTSSYEDLSGFYREVEHQGYKITFQNVPESYINRLVDEGKLFLFKIWNKDFSTYNKGKPNLHTMYWKALFDPKNLKDVIYKLNGRAEMFYRRKSISKDRKFVHKANKSIENKNPNNTKKESVFEYEIIKDKRYTMDKFQFHVPITLNFKAKRNEHINASVLEY

SEQ ID NO: 6537 - protein, 1286 aa, unidentified
  source 1..1286: note = MG29-214 effector
MVKNLYSEFINIYNISKTLRFELIPQGKTEDNIQKKGLIDNDLERDNEFLEIKKVMDKYFKYFIEVSLDKIEINKLDLMEYNRIYCELKKDKTNENLKEEYSKIQNKLRKYIYSEVKNKPNYNELFKKDFVQKILPAWLSGISEDLDNKIKDELIKVKKFSDWITYFQGFFENRKNIFTDAEIPTSMIYRIVNDNLPKFLDNLSKYEELKKYENKGFDFNYINNHFKSELNHLDINNFFTLSNFNVCLNQKGINNFNTIIGGKSLENGEKIKGLNELINLYSQQNNEEKSIKKLKLIPLFKQILSDRESFSFILEKFKDDKDVINTINTFYVELNNQNVLLNLKNEILSLGDKDLNLIYIKNDKNLPLISQRLFGDWEKIHQGLRLYAKYNLPNLKGDKKIESYINNTSYFSIYELEKAIELLNITNEITNENLKVYLEKINGNIKNPICGYLSLFKNKDENLFENINNNYLKFQKVLNKNFKENQKKLLTLDFESDSEIIKIFLDSILSVFHFMSSLNIRLNKKDEDKGQEAFEIDTEFYLKFNENYEKLKEIINIYNKTRNYITQKPFSTKKFKLNFENSTLLAGWDKNKEPDNFSVIFRKENNYYLGIMAKGNNKIFSKIENLNINSNYFEKMEYKLLPGPEKMLPKVFFSSKSIKFFNPSSEILAIRNYSTHTKGGNSQKDFDKKDFNLNDCHKMIDFFKESLNKHEEWRNYNFKFEETNTYKDISEFYTDISNQAYSINFIKIPQKTIYDLVEDGKLYLFQIYNKDFSSFSKGKKNLHTIYWEELFSKDNLNDIVYKLNGQAEIFFRKKSIDAKITHPKNQEILNKDPIKNKNKSNFSYDIIKDKKYSSDKYLFHCPITLNFKCKDKNKELNKKINAVISKNSNEINVLSIDRGERHLAYYTLLNSNGEILKQDSFNIITDEFSRNVNYHTKLDKLESSRSDARKNWKNIENIKELKEGYLSQVIHNIAKIAIEHNAIIIFEDLNFGFKRGRFKIEKQVYQKFEKMLIEKFNYLMFKDIDKNQVGGSLKAYQLTPKFESFKKMGKQTGIIYYVDANFTSKICPKTGFINLLYPKFENIEKTKDFISKFKYIKYNKSENLFEFNFNYSNFKLAKEESKVIQDNWSIYSNGKKLVSFKNSDKNNNWDIKEVEVNLELKKLFEEFNIDFKSGENLISKITKQTEQKFFKSLIYYLRLILQLRNSKINSDEDYILSCVKDKEGIFFDSRNASKNEPKNADANGAYNIGIKGLMLVEKIKKLKPNEKLDPRIIRDDFINFVIKKNK

SEQ ID NO: 6538 - protein, 1240 aa, unidentified
  source 1..1240: note = MG29-215 effector
MALIADEFLGQYSLSKTLKFELVPQGKTKDLINNLDDSILAIDAKRAAEYKNVKKILDDYYRFFIEQVLEKNILDEKDVKEAHVAFQQRAKDSKAFEKTQDNMRKKIAKALKDGRSGSQLDAYEKLFKNDDKSGLYKWLNYRKDRKELTEELYESYKKSLQQFDKFTTYFTGYKDNRENLFSAEEKSSAISYRIVNENMVRFFENCQRFEDIQKKHEGLYEQLKDNQAIFQFNKFTELLGQSKIDEYNRMIGFSIENSDTKGINSLINEYRQKNHIKNRELPMMVQLYKQLLSDREKSFVIDEITSDEEMEEKATECCLEVREIEKKIALLVKEYVTGDNTGRIYLRGSKLTDLSQNIFGQWDIINKALQMKLETLATKKHKEEFDKRSKKAININELNDILQEYFIGLDSGEYKIMQEKPALSELIIENIPVVEYSPVLNGLGFGTKEERINKIKGVFDQIISMLHYYKIFYLYEGNKQLEVAEKDAFFYSEFDGLYNDLSLATKVYDHVRNYVTKKPYSENKIKVNFNAPTLLNGWDINKEESNLSVLLEKNGLYYLAIMDINHRRCFDLKDIEVAKAALCDVDKPCFNKIEYKQVTGANKMLPKVFFAESNVDYYAPSSEIMTIREKGLYKKDANNIKAMWQWIDFCKQSTEKHPEWNKYFKFNFKPTKNYMDVNGFYRDFDNQAYAIKKVRISEKYISDLVAEGCLYLFQIYNKDFSQYSKGKQNLHTMYWRMLFDSQNLKNIELNANAKIFKLNGEAEIFFRRQSLEKNITHAKDMPIENKNPHNPKKQSTFEYDLIKDKRYTENKLFFHCPITINFRAASLPVQFNKKVNKFVANNPDINIIGIDRGERHLLYFTIINQKGEILKQGSLNHIKDNYISNGKEVPVDTDYHELLDRKEKERDAARRNWTTIENIKELKSGYLSQVVHQLAELMIEYNAIVVLENLNAGFKNGRVKVEKQVYQNFEKALINKLNYLVFKDCSLNQPGGVLKGYQLTAPFDSFRSLGSQSGFLYYVYPSYTSHICPKTGFVDLLHPKYQSVAEAQRFFERFEFIRFNQDEGYFEFGLDYDRFGKKMNKSKWIVCTYGEERYGFDGKDMTAKKYNVTDEISALLDKVKIVYGGGRDIKNDISTQDDKAFFKSLLYFLCLTMQMRNTNGGTNDDNDYILSPVQDKKGNFFDSREANDTEPKNADANGAYHIALKGLKLISSIDEEGKIVLKKTETQDWFNFAQEKSYLK

SEQ ID NO: 6539 - protein, 1259 aa, unidentified
  source 1..1259: note = MG29-217 effector
MKNILKPFTNKYSLSKTLRFELKPVGATLTNIEKKGLVSEDENLAVSYKKLKKVIDEYHKDFIGLALKDLKLNILDDYSDLYYKTIKDEIDKKRFIELQLNLRKQIVDSFSKNASDEIKNKFDRLFKKELIQIDLIEWLKSKNDFETIELVEKFKTFTTYFNGFNENRKNMYSVDEHSTAIAYRLIHENLPKFLDNLKAYRFIKKSYLDFDFNKIEKELELISVSFDSIFDVNGFNQTLTQNGIDFYNTMLGGLTEGHGKKKIKGLNEFINLYKQEKHLKSKEIPSLKVLFKQILSDRESVSFLQDEFIDDSDVLNSIEVFYREEIKEKVIDGNTINILETIDSVLKEIESFDTSKIYLRNDTSLTDISQRLYGSWSVVKNALSHYFEEIVKPLNGKKRTEKYDKELEQWLGKQNQQFSIKFLQDVCTSYFSSQDEKPLNVNGKEWLEYFKNTGSISNDVNSISFIKRIETAYSAIESFLNVELNSSNRKLVQEQVKVDLLKLFLDEIVTFLHFIKPITLKDSSIEKDDVFYSVLEGLYNQLDFVTPLYNKTRNYLTKKAYSLEKVKLNFQNAQLLNGWDVNKETDNTSILFRKEGLYYLCVMDKKHNKVFKSPNDFPKNEEEYYEKVNYKLLPGANKMLPKVFFSNKSIEYYAPSFELLEKYKNETHKKGETFNLNDCHDLIDFFKESINKHPDWKNFNYQFSETSSYEDLSGFYREVEHQGYKITFQNIATSYIDDLINEGKIYLFQIYNKDFSPFSKGKPNMHTLYWRALFDENNLKDVIYKLNGEAEIFYRKKSLEYSDDIWLKGHHANDLKGKFDYPIVKDKRFALDSFHFHVPITMNFKANEGNNFNGQVNEFLKNNKDINIIGIDRGERHLLYLTLINQRGEIIIQKSLNTITNKVKDELVSVDYHKRLDDREKNRNNARKTWGTIETIKELKEGYLSLVIHEVAKMMVENNAVVVLEDLNFGFKRGRQKVEKQVYQKFEKMLIDKLNYLIFKDRKDDEIGGVFNALQLTSKFESFQKLGKQSGFLFYIPAALTSKIDPATGFVNFMDTKYYSVEKSKEFFGKFSNIQYNIDKDYFEFEFDYNSFTTKAEGTKTKWKVCTSGDERWRYNPTTKNSERVNVTAELKTLFEKNQIIFKNGNDLKSYIIEKDEKGIYSTLLHLLGLTLSLRHSESGTENDFILSPVFNDSEVFFDSRKATEKSPKDSDANGAYHIALKGLWALRQIDSCDDWKKLKLAISNKEWLDFVQKRPFEK

SEQ ID NO: 6540 - protein, 1255 aa, unidentified
  source 1..1255: note = MG29-218 effector
MKLNNFTNQFPLSKTLRFELIPQGNTLEFINKKGLLEKDNNRADSYKKLKKIIDEYHKLFISESLNGFRLFDLDTYAELYQKKEKDDKDKLTFEKVKGVLRKQISDTFKVQNKYQNLFAKELIKEDLLAFVGIEDKPLVNEFKDFTTYFTGFHENRKNMYVADEKATSIAFRLINENLPKFIDNLNISSQILGRTNGLAEEFKLALLEMEELVQDTKLHEIFNIDYFNETLTQRGIELYNTVIGGKVSEDGNKKIKGFNEYINLYNQLQQDKKNRLPKFKQLYKQILSDRNSTSFVIDNFESDSQLLESIEQFYQSGICHFESDGNSINILIAIQALLSSLANFDLSKIFISNGSSLTEISQKLFGDWSAIGAALGEYYDKEYPSKPKERPDKFQERKEHWLSKTSYFDIATIQLSLDCYQNENVKEKNKPNVLIDFLGTMGTDSATKLNLINIVEQNYAIIKDLLNNNYPEEEKLGSSKEQVAQLKIFLDGLMNVLHFIKPLNIKSEGLEKDETFYSVFIQLYEQLSHVIPLYNKVRNYLTQKPYSITKVKLNFENSTLLNGWDVNKESDNSCVILRKNGLYYLGVMDKLNNKIFERNVPKCLVESSAFEKMNYKLLPGANKMLPKVFLSKKGLETYSPSFEIVENYESESHKKGETFNIDHMRGLIDYFKNSISRHPDWKEFKHKFSPTESYIDLSGFYREVEQQGYKITYTNIDESYINHLIDDGKLYLFQVYNKDFSPFSKGTPNMHTLYWKMLFDKNNLTDTVYKLNGEAEVFFRKSSISQKNRVVHKANESIKSKNDLNLKRQSNFNYDIVKDKRFTLDKFQFHVPITMNFKATGNDNINQNVNQFLKNNQDVNIIGLDRGERHLIYLTLINQKGQILKQESLNVISNEKQEVNYKEILQKKEGDRTQARKDWNTIENIKEIKEGYLSQVVHKIALMMVEQNAIVVMEDLNQGFIRGRQKVERQVYQKLEKMLIDKLNYLVFKNKSPGESGGLLKALQLTSKFESFKSMGKQSGFLFYVPAWNTSKIDPTTGFVDFLKPKYENIDKAKAFFKKFDTISFNNEKNYFEFKFDYKDFTTKAEGTQTNWTVCSHGKERYTWNRNLNLGKGGIEIVDITQELQLLFGNVNISYAHGCNLIDDLIIQTNVDFFKKLLRLLSITLSLRHSNGLSGVEEKDYILSPIKGKDGVFFDSMKADCTLPKDADANGAYHIALKGLWVLDKINDADDLKKVKMAITNKEWLQFVQTKPYRN

SEQ ID NO: 6541 - protein, 1256 aa, unidentified
  source 1..1256: note = MG29-219 effector
MKNQHLFSGFTNQYAISKTLRFELKPVGRTLEHIEKKGLITQDNQRAEDYKEVKILIDEYHKNFIEKSLDGFALNGLQEYYDLFIKTNLEEIDKKALDKEKDNLRKQIANRFKKHDKFKSLFAKELIKEDLIGFVSEENKELVNKFKNFTTYFTGFHENRKNMYVADDKATAIAYRLIHENLPKFIGNIIIFEKIKKDAPDLVSQLNNVLSEMEEIIQGKTLEEIFSLDYFNETLIQTGIDLYNIVLGGRSEDGKDKIKGLNEYINLYNQKQTEKKNRQPKLKQLYKQILSDRDSVSFIAEEFKEDTEVLEAIEKFYQGELCNYESDGQAINVFNVSKKNLIGNLSSFDLSKVYLRNDRAITYISQQMFSDRSIVGNALQEYYRAQNPQKGKEKTENFEKRIDKWVKKSDYFDIQTVQEALSQCSIEAVKEKNKQNAIVNYFADMGLNEEIKMNLFDKVIADYKNVKDLLNTSYPENKKLGNQKGKDSDIEKIKTFLDSVMNIIHFIKPLNLKDESKEKDETFYSLFLPLFDQLNKTILLYNQVRNYVTKKPYSTEKIKLNFENSTLLDGWDVNKEQDNTSVILRKDGLYYLAIMDKSNKKIFLNAPKADDKKDSFKKMNYKLLPLVNQQLPRVFFAKSRIEYFNPSSKIVQNYKNNTHKKGDTFNINDCHALIDFFKASLEKHEDWKHFNFKFSPTKTYQDLSGFYREVEQQGYKMTFENIPTDYINEMIEEGKLYLFQIYNKDFSPYSKGKPNMHTIYWKMLFDEQNLKDVVFKLNGQAEVFFREKSIKDNIIVHKSNNSIENKNPDNPKKQSKFNYDIIKDKRYTIDKFQFHVPITLNFKATGRDYINEDVNRFLKNNKEVNIIGIDRGERHLAYYMIINQKGEILEQTSFNIISSKHKENKYSTNYHALLEKKEMARDKARKSWDTIGTIKELKEGYISQVVHKIAQLMVKHNAIVVLEYLNPGFKDSRKKVEKQVYQKLEKMLIDKLNYLVFKDYEANTTGGVLKALQLANKFTSFDRLGKQSGFLFYVQAALTSKIDPATGFVNFLYPKYESIKKAKKFLDKFDKIIYNNSKNYFEFAFDYNNFTTKAEGTRTKWVVCTHGDTRYRYNPQTKTSEEVNITQEIKYLLIKHNIQYENGNCFKNKLIQAEDKKFYSKLLHLLAITVSLRHAKSGTDIDFILSPVADKNGVFFDSRKANDTMPKDADANGAYHIALKGLLALNKISNTPDDKLNKVDLKITNKEWLAFAQKKN

SEQ ID NO: 6542 - protein, 965 aa, unidentified
  source 1..965: note = MG29-220 effector
MFNHFTHQYSLSKTLRFELKPVGETADYLEDFKSQHLKDFIEKDQQRAEDYKIIKELIDDYHRQYIEEKLSAPVDPKTGELWLNPEDFEEAYSYYQKLKADQSDPKNRKQWEDIQTELRKKLVKAFTNKAGLFKKELITRDLPEFLKRKGQWEENKKVVENFSRFTTYFSGFHENRKNMYTHEDHSTAIAYRLMNENLPRFFNNCLAYKHIKDKYNDLPLKINSELQSQLGVTNINDFFQPRYFINLFSQTGIDNYELLIGGKTEENGTKIQGLNEQINLYRQQLQHKMKDEAKADDKKSKRIYDLSGFTHLYKQILSDREKISFIPEAFEDDKQLLASLEEYIATVTDEKEGAIKKLEQSLQKLANADLSKVYIKGAGLTDLSRNMFGAYGMITASLSYYADEKLSTKKKPEDYLKQKVYSLDELNHHLIAYIDSKEKDDVLHEQLAKLPNPKQPISSYLVSIIKQTQQDVELQTTIDAVKPLLKLESLSKARKAPELDNENDEGAVGFQQVQKIQKMLDGFKSILHAVKLLHLVDGRKPIDMPDKDDGFYNDFAEVYEAYTNLTVTLYNKARNHLTKKLYSNDKIKINFDKANLLNGFVESQTDKSYNGTQYGGYLFRKRRDDGGFNYYLGISSKNNLFRFDQEISDELSKYERLNYYQAKTNSIYGSSYIGNYGDDKSRLINSVISFLEKNNMEEADNIINGFNELVDQQKTPTRLFLMILESSQVLLDQVRADKEVNLFERTLMTNLKETLRNFKDKAPALFALRKRDFQSIKEFQLAIEEAVTNKSFVYKNISKSEMDEVLTNNTMQLFWIYSKDFSEKRIKRRKRIDNLHTLYFKALMSGTNDRYDLGKGDVFFRKHSIEKHATHPKGEAIKNKTSNAKNKTSKFNYNLYKDKRYAVDKFLFHLSIEINYQKSKSPSSKIFNDQINKTLAQQKETCVIGIDRGERHLLYYTVVNSKGEI

SEQ ID NO: 6543 - protein, 1339 aa, unidentified
  source 1..1339: note = MG29-221 effector
MYFAIRISPWFKALLKLLQIIKYGNYTLLIYFSFIFIGIFIKILTMKNLIDFTGLYSLSKTLRFELIPQGKTLENIEKKGLLKQDEARAEKYKKVKKIIDEYHKDFIEKSLNTIKLEGLEYYYDLYLKTNKEDKEIKEFSKQKERLRKQIANAFKANEKFKTLFLKELIKEDLLSFVSNEEDKADIKEFKDFTTYFIGFHQNRENMYVAEEKATAIAYRLINENLPKFIDNIKIFEKIKNEAPELINQLNQVLSEMEEIVQGKTLEEIFSLNYFNQTLTQTGIDLYNIVIGGRTPEENKTKIKGLNEYINTDFNQKQTDKKKRQPKFKQLYKQILSDRHSVSFMPESFENDNQLLESIENFYTNELLHYSTEGKSISILEAIKNAVGNLSSFNLSKIYLRNDTSLTDISQKVFGDWGVISKALQDYYEKTNPLKPKEKQEKYEERKDKWLKQDIDIQTLQTAIDHYENETVKEKNNGNVINDYFAKFGMNNESKIDLLQNVYQNYNIIKDLLNTPFPESEKLGSNKELVNLIKAFLDSIMNVIHFVKPLSLKDSDKEKDESFYSLYTGLYDQLNHTISIYNQVRNYLTQKPYSTEKFKLNFENSTLMDGWDLNKEADNTTIILRKDNLFYIGIMDKKNNHIFKHIPEMIDYEPHYEKIIYKYFPDASKMIPKCSTQLKTVVSHFESNITDKIIEGKSFDSALKITKRIFELNNFVYDDISKTMVLSEDNEKRPKMFQKKYLEISKDIDGFKDALKDWINFCIDFLNKYESTKHYSFNFKNSELYNSLDEFYGDIDTQTYKITYNNIPVSFIESLVNEGKLYLFQIYNKDFSPFSKGKPNLHTLYWKMLFDEENLNDVVYKLNGQAEVFYRKSSIKESNKVIHNANETLTNKNPDNEKATSKFDYDIIKDKRYTLDKFQFHVPITMNFKADGILNINPKVNEFLKNNHDVNIIGIDRGERHLLYYTLINQQGEILEQDTLNIIENEKQKVDYHNLLDKKEGTRAEARKDWGTIETIKELKEGYLSQVIHKLTTLMVKHNAIIVMEDLNMGFMRGRQKVEKQVYQKFEKMLIDKLNYLVDKSKKANESGGVLRALQLANKFESFKSMGKQNGFIFYVPAWNTSKMDPVTGFVNLFDTRYENLEKAKAFFNKFNSICYNQTKDYFEFEFNYANYTAKAEGTKTNWILCTYQNRIETFRNTAKNSQWDNREIILTNEFVKLFEQHGIDYKNNNELKSAIVMQTEKAFFERLLYLLKLTLQMRNSITGTETDYLISPVANDEGEFYNSRNANNKLPQNADANGAYNIARKGLWCLQQINKTDDLKKIKLAISNKEWLQFVQNNN

SEQ ID NO: 6544 - protein, 864 aa, unidentified
  source 1..864: note = MG29-222 effector
MEDNNKCIWNEFTNKYKLSKTLRFELKPIGKTLENIKEKGLIEEDKKREKDFNKIKKILDNYYKDFIEISFSKIELNIKDLEEYSEIYNKLKKEKINIELQKKYKKIQDKIRKDTYNKIKTIEPYNKLFKGEILKNILPKWLEKNNYSEDDINLVKSFEKKWKTYFTGFFENRKNVFSEKPIPTSIIYRAINDNLPKFLDNLDKFKKIQELDDFSYNSVEEQLSEKLNNTKLNNFFTLDNYNNLLNQKGIDLFNLIIGGKSENEQKIQGLNELINLYSQKITDKNESRKIKKLKMLPLFKQILSDKESFSDKLEPFKNNKEVIDSINEYYTNIYLKNYNKLIELINNINKYDIKQIYIKNDSSLKTISKQILGDWEKIHIGLKEFARKELNINNNTKINSFLKQKYFSVYEIEESIKLLKIDNKQSIYDYLSNFYKKINKPEDNKKNKLITDIEEKYNLFKNIEYNNLNRFSNQNIEIIKDFLDSIMDLIHFIKPLYIKNNVKEDDKHQEAYEVDSDFYNQFNDIYKEQLSQIIPLYNKTRNFISKKLSSTKKFKLNFDNSNFLKGWSSKFETNSALILRKKNNYYLAIVPKKLNEEEIDKLKDFNSLNKIEVLNYDFQKADNKNMARTFIRSKGDNFAPSVEKYNLPVEKILDIYDNGYFRTNYREKNIVKFKESLIKLIDYFKEGLKKHESYKHFDFKWKESGEYKDISEFYHDVEVSCYNPSFYEVDYNYIENLMEEKKIYLFQIYNKDFSKYSKGKPNLHTIYWRELFSKENFNNIVYKLNGEAEIFFREKAIDKNKTTIHNKNELINNKNPINNKKQSIFEYDLIKDKRYTENKFLFHCPITINFKAKETGTNLHKQVN

SEQ ID NO: 6545 - protein, 797 aa, unidentified
  source 1..797: note = MG29-223 effector
VEKIRLFLESLLELFHFIKPLKIEEPRKGDKELQGAYEIDSDFYNEFDEIFEKVKGIIPLYNRVRNYITQKPFSTKKFKLNFENSTLLNGWDENKIKDNFSVIFRKRNERGQYEYYLGIITPKDKTVFNNLEPCDSGDCFEMVKYKLLPGPNKMLPKVFFSAKNIEFFNPSEEILSIRNHASHTKNGNPQEGYSKNDFNLEDCHKFIDFLKDSLNKHEEWKLYNFRFKETVKYNDVSEFYKDVADQGYKIEFINVDKSYIAKLISEGKLYFFKIWNKDFSEYSHGKKNLHTIYWEQLFSDENLKDVVYKLNGEAEIFYRRKSIPLQITHPKNNPIINKNPINDKETSEFNYDIIKDRRYAVDKFLFHCPITLNFKAEGNGRDMHRRINMHIQESNEDINILSIDRGERNLAYYTLLNSRGEILVQESFNIISDELRRRFNYLELLSKREGEREEARKQWKNMSNIKELKEGYLSHIVHKIAKIAIENNAIIVLEDLNYGFKRERSKIEKQIYQKFEKALIDKFNYLMFKERNANETGGALRAYQLTNKFESFKKLGKQSGILFYVPAANTSKICPRTGFVNLLWPKFENIKKSQDFFSRFKHIKYIADEDLFEFKFSYSDFNMRSYTGKVKLDEKADSWIVYSNGTRLVNYRNKDKNSNWDTKEVYLTKEFKELFEKEGINYEGREDIKAEIANKDSAEFFKRAIELLRYTVQLRNSRIGSDEDYILSCVKDKNGEFFDSRNAKEGEPKDADANGAYHIGLKGLMLLERIKKASNPGRINLKIERNEFINYVVNKRS

SEQ ID NO: 6546 - protein, 989 aa, unidentified
  source 1..989: note = MG29-224 effector
MSKIYQQFTRLYKIQKTLRFGLKPVGETANAIDDFKSQYLQDVVQEDGQRAEDYKVVKDLIDDYHRVYIEEKLSQPVDRATGEMWVTPEHLEAAYYDYQNLKNNDPKDNKIKKAWAETQKSLRKKLVKSFSDNSDLFRKKLITRDLPAFLKVQGKWEENEKAVKSFNKFTTYFKGFHENRKNMYSDEDQSTAIAYRVMNENLPKFFNNYLSYQKIKDKLKFSVEKELFTKMGISGIGDVFQPRYFIKLFTQSGLDNHQELLGGKTNEDGRKIQGLNEQINLYNQQQSDRQNKLPRFTSLYKQILSDREAHSFIPEVFKDDQELLKTLQGYIEKATKKEGLLDNLEKSIALLSTADNEKVYVKTVGLTDISSALFGSYDIIGAALSHHAENTAHQNHTKKPASKTLIKKRESFCKQDVFSTAKLDEMITAYIAQLEKTDPLHQQLKKLKTPKRPIQIYFLEAFQQAKKEYGFDACIKNITPLLSLESLSKKRQAPTSEGEQGDKGYQQLHSIQKMLDAFMAISYKLKPLHLVKGRKAIDMPDMDMRFYTKFSESYEDYSDTIINLYNKVRNHLTKKPFSKDKIKLNFGNPTLLDGWDANKETDNSSLIFEKDGFYYLGIMHPKHKDLLNYITGIDDIGNDKKTKKKELLKKNIEANKNEQHYRKIVYKLLPGANKMLPKVFFSGKRQDYFSPSSEILRIRNSASHSKNGNPQEGHAKAEFNIDDCRKIIDFFKVSISKHPEWRAFDFQFSPTQNYQDLSDFYREVEQQAYRVDFDLIKQSYIDECIIKGKLFLFQIYNKDFSPYSKGKPNLHTLYWKGLFDPENLKDVVLKLNGEAEVFYRPSSINVADRTIHRANEAIDNKNKEFHRKSTSTFAYDIIKDRRYTQDKFQFHVPITLNFKAQGKPHFNDTVNLELRNKKDTHVIGIDRGERHLLYYTVVNSKGEIIEQDTLNNISTDQGYAIDYQNKLHKREKERDAARKSWSHRKYQRT

SEQ ID NO: 6547 - protein, 779 aa, unidentified
  source 1..779: note = MG29-225 effector
MKEDIKTKIDIWDDMTNQYSLSKTLRFELKPIGRTLENIQYIIEEDKQRDKDFQEVKKIMDKYYSHFISRVLNNKIKISRDSLDEYKEIYFNLKKKIHDNDLKKQLELVQKKITKNISLMIKSDEDFKNIFGKEFVKEILKKYLEEKGNQSELELVSKFNDWTTYFTGFYDNRKNVFSDKDIPTSIIYRIVQDNLPKYLDNLYNLEQLDKYDIDFSYLNENFGGSIGNKDLKEYFGIENFNEFLSQDGIDKYNYLIGGYSKDMKDKVKGINNIIQEYSQQNKEDSDIKKLKFTSLYKQILSDKDEKISFRFFNFNSVDEMLKCIDIFYNKLNDENIFENLNFLFDDLNSEIYDKNKVFIKKNKLTFLSNELFGNYSVINYLLKEYVMKNYKDYNTEAKFEKWFKGKELFPLSLIEISIARVFDFFDSNSSEIKRFQNIVGVNFINPISFYLTQFKTEGFNLFEEIKSNYEAYRNLLSSNILDKQNLSQEEKEIKSKQVEILKSFLDSILKLNSFVDIFSTYNVKKDIVEKDNDFYNNYEELLLCISEVISIYNQVRNYITKKKTDIKKFKLNFEKSTLLDGWDVNKESANLSVVLRRNGKYFLGIMNKKDNKIFDKILPEFITSNNESFEKMEYKLLPGPNKMLPKVFFSEKNIKYFNPSQEIIDIRNYSSHSKNGEPQKGYSKKDFNLDDCHKMIDFYKESIEKHDEWKSFKFNFKPTQEYIDLSEFYSDVSSQGYKLDFLGISNKYVEKLVEDGKLYLFQIYNKDFSNYSKGKKNLH

SEQ ID NO: 6548 - protein, 1210 aa, unidentified
  source 1..1210: note = MG29-226 effector
MLQNFTNQYQLSKTLRFELRPVGKTKEHIEAKGLIIQDEQRAEEYKEMKKIIDRYHKAFIEDALNGIAIEGLETYEKLYFAIKDEKGKKEFEKLQDTLRKRIVELFKKHPKWSTLFKKELIRNELLTFLDSEEIPEEQKINEKEIVLKFVDFTTYFTGFHENRANMYIDEALHTAVAYRIVHENLPVFLGNKKTFEQIATKYPELIADSKDAIESHLFGAVFEDMFTLAYFSHTLAQNHIDLYNTMIGGKVSNDGSKIQGFNEKINLYRQKHGLSKRDLPNLKPLYKQILSDRESLSWLPEAFEDKNELAEAIKTFYQNNIIAFECCDGKVNLLEKFPEIFKENQYYDLSKIFIKNDKSLTDIAQAIFGKYGVIKEALWEKHLRDNPKAAKSKDISADEERFFNKKDTYFSINDIHIALKEAQSPSDILTYFSNEIKPLTKAVQVAYKTWLDDQEKTERIKEVMDALLAWQRFLKPLSVKSDVDRDIAFYATFESYFESLSAVVKLYDKVRNFMTKKPYSLEKFKLNFENSTLLDGWDVNKETDNTAILLEKNGLFYLGIMDKKHNRVFKNTPESQDDSSYRKINYKLLPGANKMLPKVFFSNSRIDEFAPSSDIISNYKKGTHKKGEIFDLEHCHKLIDFFKSSIQKHEDWKNFEFKFSDTASYKDLSGFYREVEQQGYKITYKNISQSYIDTLVSEGKLYLFQIYNKDFSPYSKGTPNMHTLYWRALFDEKNLADVVYKLNGQAEVFYRKKSIIYSDEVMQKGHHAKELVGKFDYPIIKDRRFAFDKFQFHVPITLNFKAQGYTNLNAIVNEMIASGKEDIKIIGIDRGERHLLYLSLIDAQGKIVEQYTLNQIINSYNGKDHVINYHEKLAKKEDERAKARVNWGTVENIKELKEGYMSHVIHRIATLMVEHRAIVVLEDLNFGFKRGRFKVEKQVYQKFEKMLIDKLNYLVDKKKSPNELGGVLNALQLTNKFESFEKMGKQNGFLFYVPAWNTSKIDPVTGFVNLFDTRYASVEKSKEFFGKFKSIRYNSEKDYYEFEIDNYTQFNPKAEGTRQNWTICTYGDRVLTYRNSEKLNQWDNKTVQLTDGFKTLLNGQADNLKEYIVAQNDKAFFEKLLGLFRLTLQMRNSITGTDIDYLVSPVVDENGVFYDSRVCDDTLPKDADANGAYNIARKGLMVVKKIKEAQDIKKPDLKITNKEWLQFAQR

SEQ ID NO: 6549 - protein, 1287 aa, unidentified
  source 1..1287: note = MG29-227 effector
MGVNTVWNEMTGIYPVSKTIRFELKPIGRTLEYINSKRLLEEDEQRAKDFLEVKKIMNDYFRELIKTYLANVELDKNLLEQFKEAFIRLKGNKSDSKLKKEYKEFANKLCKELHDNAKLGELEKIKEKNFFKPLKEWLKKNNRDEDLKLVISFDGFLIYFRGFFENRKNIFKVPKKDNEDAISTSIVYRTINENLVLFLDDLLKFEELSKLGIDFSEVEENFKEELGGKKLTEFIALVNYSSFLTQEGIDKFNLIIGGKTTENGIKLKGINEIINLYSQQKGDKSIRKKKLKQLYKQILSKSNKPSFIPEKLKDDREFIDVIRSADKRSDFREIRELFNNLNNYDLNEIYIKRDDLTKLSKDLFSNEEYLNKLIIEYRFAEKTDKQKETEFKKQDYFSIKEIEDAINNEKGLFDLDEDKENFKDKISNNSEHPIVGYFQRFYFKGEDLLKNIEDSYKAVEEILERDYSNGTKEFLQQNKEREVEKIKLFLDNSLNILHFIKLLNYKKGKVGSYATLDVDSDFYEGYKVDEKEIKGFFWFYNSIKEIVNIYDKARNYVTQKPFSKNKFKLNFNNSTLAAGWDKNKEVDNWTALFRKDGRYFLGIMDKDSNRLFKEISKNENDDFYEKVEYKLLPSPSKMLPKVFFSDKWKQEHKISEEILKIYENRTFMKGDNFRLEDCHKLVGFYKESIKQHHEWDLYFNFKFKDANKYSDIGEFYRDVQNQGYSISFANIDSEVINNYVDKGKLYLFQIYNKDFSENRSEKNKNSKKNLHTLYWNALFSEENLKDVVFKLNGEAELFFRESSIKKEDKVVHKKNEFIKNKDPINGKIESKFSYDLIKNKRYTEDKFFFYCPITINFKANGNEKTLNKKVSETIKKNFDGIKVLGIDRGERNLAYFSLINQNGEIEKQDSFNIVLDKFNRKNNYLEKLDKKEGQRNEARKNWTKIENIKELKEGYLSQVVHQVVKMAIENNAIIVFEDLNSVFKRGRFKIEKQIYQKFEKMLIEKLNYLMFKDIENNKSGGLMKAYQLTPKFYSFKKLGKQTGILFYVNANYTSKIDPKTGFVNLLYPNYENEKQAKEFFKKFDSIKYNKEKDYFEFKFDYKNFKVEEKNLPKKSKWVVCSYGERLHQEKDPKSKAWNTVKINLTERLKELFNNSKLDYYEGEDIKEEILKQNNAKFFKELVFLLNKILQIRNSYTSGELRKKIEKRELNFESEGDYILSCVHDKNGEFFDSRAAKEGEPKDADANGALNIARKGLIILERIKESREKPDLKIENKKFFDFVNERFN

SEQ ID NO: 6550 - protein, 932 aa, unidentified
  source 1..932: note = MG29-228 effector
IKSALEFYYENEIDPEFEEKLKNAKSINKSKKISKEKDSWMKDYVTIATVQKALDVYIESLDTKHDLRDVYSESLITKYFTNYFKTRLTSGEEVDYIYNIGQKYKAISGILKTKDEDVLKKESVVDQLKDFLDSMIDLNRFVQPLNLPSEDLESLSCKDEIFYSDFAPLMEQLNKIIRLYNMARNFITKKKSDEKNIKINFENATLMFGFDINKQYDNSAFILRKNGLYYMGIISKTCKKFIFDDMPRIKDESNAYEKMNYKLINNAYMSLPHVFFSKSRAQEFKPSEEIERIHLTKTFKKGDNFNIKDCHKMIDFFKESIKKNHDWNVFNFKFSPTESYNDISEFYREVDIQAYKVWFDEKISDSYINTLVEEGDVYLFKIYGKDFSEHSKGMPNLHTMYFKSLFTEENLKDVVYKLCGNGEIFYRKVLIKKEDTITHPANEEIKNKNPLSENKVAIFNYEMKKDKRFTVEKYFLNIPIELNFKADGHENINNKINNIIRNNEYANKLSMDRGERNLIHIIVRNQKGETLESIRLNIINNADYKRLLKERENERKTARKGWKTIENIRNIKKGYLSQAVNVVVSLVRKHNAVIFMEDLSFGFKNGRKHIETQIYQGFEKALIDKLSYLVFKDKGMDSKEPGGTLNALQLCNKFKTFKEMGKQNGIIFFVPAGYTSKICPATGFVNLLKTKYESNKKAKFFFSNFDYIKYNKDKDYFEFSFDYNNFIKSNDENSLRNTKGAITKWVACTYGDLRYKYNRNTKASDEINVTQNIKSILDKFNIPYKNGKCFKSSLIEKDEKDLFCEILQMLSLTLSLRYSKTGTDIDFILSPVANKNGVFFDSRNATNAMPKDGDENGTYHINLKGDWVFEQINKTEDSKKPNLYLRNNEWFAYAQSKCNEIDNAPNWNYRIKKEVSKKKTSKKNKKEVVVKK

SEQ ID NO: 6551 - RNA, 40 nt, synthetic construct
  source 1..40: mol_type = other RNA
taatttctactgttgtagattcttgtccgtggtgggatgc

SEQ ID NO: 6552 - RNA, 40 nt, synthetic construct
  source 1..40: mol_type = other RNA
taatttctactgttgtagattcttgtccatggtgggatgc

SEQ ID NO: 6553 - RNA, 40 nt, synthetic construct
  source 1..40: mol_type = other RNA
taatttctactgttgtagatcttgtccgtggtgggatgcg

SEQ ID NO: 6554 - RNA, 40 nt, synthetic construct
  source 1..40: mol_type = other RNA
taatttctactgttgtagatcttgtccatggtgggatgcg

SEQ ID NO: 6555 - RNA, 40 nt, synthetic construct
  source 1..40: mol_type = other RNA
taatttctactgttgtagatttgtccgtggtgggatgcgt

SEQ ID NO: 6556 - RNA, 40 nt, synthetic construct
  source 1..40: mol_type = other RNA
taatttctactgttgtagatttgtccatggtgggatgcgt

SEQ ID NO: 6557 - DNA, 20 bp, Homo sapiens
  source 1..20: mol_type = genomic DNA
tcttgtccgtggtgggatgc

SEQ ID NO: 6558 - DNA, 20 bp, Homo sapiens
  source 1..20: mol_type = genomic DNA
tcttgtccatggtgggatgc

SEQ ID NO: 6559 - DNA, 20 bp, Homo sapiens
  source 1..20: mol_type = genomic DNA
cttgtccgtggtgggatgcg

SEQ ID NO: 6560 - DNA, 20 bp, Homo sapiens
  source 1..20: mol_type = genomic DNA
cttgtccatggtgggatgcg

SEQ ID NO: 6561 - DNA, 20 bp, Homo sapiens
  source 1..20: mol_type = genomic DNA
ttgtccgtggtgggatgcgt

SEQ ID NO: 6562 - DNA, 20 bp, Homo sapiens
  source 1..20: mol_type = genomic DNA
ttgtccatggtgggatgcgt

SEQ ID NO: 6563 - protein, 1275 aa, unidentified
  source 1..1275: note = MG29-229 effector
MFDDFTNQYSLSKTLRFELKPVGETLEHIKKFKNEALKRIIEQDEQRAEDYKKVKKIIDEYHKDFIEEALSNVNDPKSFERFLNEDDLEEYYELYNKSKKKNKDEKDKKEFEKIQKKLRKEIVKCFKKNKNLFKKELIKELLPEFLKEKNENEEEKELIKKFKKFTTYFTGFHENRKNMYSDEEQSTAIAYRIINENLPKFLDNIKTFEKIKKNYPDIDFNIEKELKEELNGNNLDDIFSPDSFNNCLTQKGIDNYNTIIGGKTEEDGTKIQGINEIINLYRQQNNNKKKQLPKLAPLYKQILSDRESHSFIPEQFENDKEMLDAIKEFYENIIEKKNLLEEIKNLLNNLNDYDLDKIYIKNTSLTDISQKLFGDWSVINNALNYYAENKLKFEKEREKWLKKDVFSIAEIQEALDNYNEENDEDDEIQNALKKEKNNNNPIVDYFKNFKKKKKKNLIENIEENYKEVKPILNKEYLSKNKKLTQNENDKGGKGFEQVEKIKNFLDSIMDLLHFIKPLYLEKGRKKDEVSDKDEGFYNEFDELYEELNQTIIPLYNKVRNYLTKKPYSTEKFKINFENSTLLDGWDVNKETDNTSVILRKDGKYYLGIMNKEHNKIFDYIPKANNNEDCYEKMNYKLLPGPNKMLPKVFFSKKNIEYFNPSEEILKIRNNGTYKKNGENFNLNDCHKLIDFYKESINKHPEWNHFNFKFSPTKEYEDISEFYKEVENQGYKISFDNISENYIDEKVKEGKLYLFQIYNKDFSPYSKGKPNLHTLYWKALFDEENLKDVVLKLNGEAEIFYRKKSIEKNDKIIHKKNQPIENKNPNNPKKQSKFEYDIIKDKRYTEDKFFFHVPITLNFKAQGTNKFNDKVNKFLKNNPDINIIGIDRGERHLLYYTVINQKGEILEQGSLNTITNEYKIKTDYHEKLDKKEKERDEARKNWGTIENIKELKEGYLSHVVHKIAKLMIKHNAIVVLEDLNFGFKRGRFKVEKQVYQKFEKALIDKLNYLVFKDKKPNEPGGVLNAYQLTAPFESFKKLGKQTGFLFYVPAYYTSKIDPATGFVNLLHPKYENVEKSKEFFNKFDSIRYNKEKDYFEFDFDYNKFTNKAKLTGSKTKWTVCTYGDERYHYNRKEKNQWEYKEINVTEELKKLFDKYNIDYENGEDLKEQIINQDDKEFFKKLLYLLKLTLQLRHSKTGTEEDFILSPVADKNGEFFDSRKANDNLPKDADANGAYHIALKGLMMLQQIKESEDLKKLKLAIKNKDWFEFVQNKNYKK

SEQ ID NO: 6564 - protein, 1260 aa, unidentified
  source 1..1260: note = MG29-230 effector
MMKMFNDFTNQYSLSKTLRFELKPIGKTLEHIEKKGLLEQDEQRAEDYKKVKKIIDEYHKDFIEEALSNVKLNKLEEYYELYNKSKKKNKDDKDKKEFEKIQEKLRKQIAKSFKKNEKFKNLFKKELIKEDLPEFLKEENDEEEKELIKEFKNFTTYFTGFHENRKNMYSDEEKSTAIAYRLIHENLPKFIDNIKIFEKIKKNYPDEDFNEIEKELEEYLNGNNIDDIFSLDYFNNTLTQKGIDLYNTIIGGKTEEDGTKIQGLNEYINLYNQKNKDKKKRLPKLKPLYKQILSDRESISFLPEQFENDNELLEAIKEFYENNINETENILEEIKNLLNNLNDYDLDKIYIKNDTSLTDISQKLFGDWSVIKNALNYYYENNNPKKKKKKTKKYEKEREKWLKKTDYFSIAEIQEALDEYNNENDDNNEIKEKNNDNSIVDYFKNFGTNDKKKNLIENIEENYNEVKDLLNTEYPENKKLTQDKENVEKIKNFLDSIMDLLHFIKPLYLKKDDESEKDEAFYSEFDPLYEQLNQIIPLYNKVRNYLTKKPYSTEKFKLNFENSTLLDGWDVNKETDNTSVILRKDGLYYLGIMNKKHNKIFKNIPKSNNDEDCYEKMNYKLLPGANKMLPKVFFSKKNIEYFNPSEEILEIYNNGTYKKNGDNFNLNDCHKLIDFFKESINKHEDWKHFNFKFSPTKEYEDISEFYREVENQGYKITFENISENYIDELVDEGKLYLFQIYNKDFSPYSKGKPNLHTLYWKMLFDEENLKDVVYKLNGQAEIFYRKKSIEHENKIIHKANQPIENKNPNNPKKKSKFDYDIIKDKRYTVDKFQFHVPITMNFKANGNNNINQKVNEFLKNNPDINIIGIDRGERHLLYLTLINQKGEILKQYSLNTITNEYNGKKYKTDYHELLDKKEKERDEARKNWGTIENIKELKEGYLSQVVHKIAKLMVEHNAIVVLEDLNFGFKRGRFKVEKQVYQKFEKMLIDKLNYLVFKDKEPNEPGGVLNALQLTNKFESFKKMGKQSGFLFYVPAWNTSKIDPATGFVNLLHPKYENIEKAKEFFNKFDSIRYNKEKDYFEFDFDYNKFTNKAEGTRTKWTICTYGDERYTYNNKEKNNQWDSKEINVTEELKKLFDKYNIDYKNGEDLKEQIINQNDKEFFKKLLHLLKLTLSMRHSKTGTEEDFILSPVANKNGEFFDSRKANDNLPKDADANGAYHIALKGLMLLQQIKESDDLKKLKLAISNKEWLQFVQNKNYK

SEQ ID NO: 6565 - protein, 1244 aa, unidentified
  source 1..1244: note = MG29-231 effector
MMKMFNDFTNLYPLSKTLRFELKPIGKTLENIEKNGILEQDEQRAEDYKKVKKIIDEYHKDFIEEALSNFKLDNDDLEEYYELYNKSNKDDKEKKEFEKIQEKLRKQIAKSFKKNEKYKKLFKKELIKEDLPEFLKDEEEEKELIEEFKKFTTYFTGFHENRKNMYSDEEKSTAIAYRLIHENLPKFIDNIKVFEKIKENPIEDDFNEIQKDLEEHLNGNNIDDMFNLDYFNNVLTQKGIDLYNTIIGGRTEEDGTKIKGLNEYINLYNQKHKDKKKRLPKLKPLYKQILSDRESISWLPEQFENDNEVLEAIKEFYEDLNNENVLESLKDLLNNINDYDLDKIYIKNDTSLTDISQKIFGDWSVIKNAINEEYENENPKKKKKKTEKYEEEREKYLKKTKSFSIAEINEALNEYDNEKSNNIVDYFKNLGAKDDENDKKKNLFENIEEAYNEVKDLLNTDYPEDKNLTQDKENIEKIKNFLDSIKDLQHFIKPLLGKGDESDKDENFYGEFNPLWEELNQITPLYNKVRNYLTKKPYSTEKIKLNFENSTLLDGWDVNKETDNTSVILRKDGLYYLGIMNKKHNKIFKNIPKSNNDGDCYEKMDYKLLPGANKMLPKVFFSKKNIEEFNPSEEILEIYNNGTYKKNGDNFNLDDCHKLIDFFKESINKHEDWKKFNFKFSDTKEYEDISEFYREVENQGYKITFKNISENYINELVDEGKLYLFQIYNKDFSPYSKGTPNLHTLYWKMLFDEENLKDVVYKLNGQAEIFYRKKSIEHNKIIHKANQPIENKNPNNKKKKSIFDYDLIKDKRYTVDKFQFHVPITMNFKANGNNNINQKVNEFIKDNDDIHIIGIDRGERHLLYLSVIDMKGNIVEQYSLNEIVNEYNGKKYKTDYHELLDKKEKERDEARKNWQTIENIKELKEGYLSQVIHKIAQLMVEYNAIVVLEDLNFGFKRGRQKVEKQVYQKFEKMLIDKLNYLVDKKKDPNEPGGVLNALQLTNKFESFKKMGKQSGFLFYVPAWNTSKIDPVTGFVNLFHTKYENIEKAKEFFNKFDSIRYNKEKDYFEFDFDYNKFTNKAEGTRTKWTICTYGERIETFRNPEKNNQWDSKEINLTEEFKKLFDKYNIDYNNDLKEQILNQNDKEFFEKLLHLFKLTLQMRNSNTGTEEDYIISPVANKNGEFFDSRKADDNLPKDADANGAYNIARKGLMIIEQIKESDDLKKVKLAISNKEWLNFVQNKNYK

SEQ ID NO: 6566 - skipped

SEQ ID NO: 6567 - RNA, 158 nt, synthetic construct
  source 1..158: mol_type = other RNA
acagaaaatcatcgttaagatgtttaattaactaatagttctttgaatatttgatgaaataatgtgagtggaacataaataataaagtgttaggtaacagagacaccttaaaattatggaaaatttcactatcctttcgaaagaaggggtaaaacagg

SEQ ID NO: 6568 - RNA, 128 nt, synthetic construct
  source 1..128: mol_type = other RNA
acagaaaaggatttgttatcctacataaataatgtgagtggaacataaataataaagtgttaggtaacagagacaccttaaaattatggaaaatttcactatcctttcgaaagaaggggtaaaacagg

SEQ ID NO: 6569 - RNA, 155 nt, synthetic construct
  source 1..155: mol_type = other RNA
acagaaaaggatttgttatcctacatcatcgttaagaactaatagttttgatgaaataatgtgagtggaacataaataataaagtgttaggtaacagagacaccttaaaattatggaaaatttcactatcctttcgaaagaaggggtaaaacagg

SEQ ID NO: 6570 - RNA, 166 nt, synthetic construct
  source 1..166: mol_type = other RNA
acagaaaaggatttgttatcctacatcatcgttaagatgtttaattatctttgaatatttgatgaaataatgtgagtggaacataaataataaagtgttaggtaacagagacaccttaaaattatggaaaatttcactatcctttcgaaagaaggggtaaaacagg

SEQ ID NO: 6571 - RNA, 111 nt, synthetic construct
  source 1..111: mol_type = other RNA
acagaaaaggatttgttatcctacatcatcgttaagatgtttaattaactaatagttctttgaatatttgatgaaataatgctatcctttcgaaagaaggggtaaaacagg

SEQ ID NO: 6572 - RNA, 158 nt, synthetic construct
  source 1..158: mol_type = other RNA
acagaaaaggatttgttatcctacatcatcgttaagatgtttaattaactaatagttctttgaatatttgatgaaataatgtgagtggaacaaagtgttaggtaacagagacaccttggaaaatttcactatcctttcgaaagaaggggtaaaacagg

SEQ ID NO: 6573 - RNA, 149 nt, synthetic construct
  source 1..149: mol_type = other RNA
acagaaaaggatttgttatcctacatcatcgttaagatgtttaattaactaatagttctttgaatatttgatgaaataatgtgagtggaacataaataataaaattatggaaaatttcactatcctttcgaaagaaggggtaaaacagg

SEQ ID NO: 6574 - RNA, 155 nt, synthetic construct
  source 1..155: mol_type = other RNA
acagaaaaggatttgttatcctacatcatcgttaagatgtttaattaactaatagttctttgaatatttgatgaaataatgtgagtggaacataaataataaagtgttaggtaacagagacaccttaaaattatggaaaatttcactaaaacagg

SEQ ID NO: 6575 - RNA, 160 nt, synthetic construct
  source 1..160: mol_type = other RNA
acagaaaaggatttgttatcctacatcatcgttaagatgtttaattaactaatagttctttgaatatttgatgaaataaaataataaagtgttaggtaacagagacaccttaaaattatggaaaatttcactatcctttcgaaagaaggggtaaaacagg

SEQ ID NO: 6576 - RNA, 153 nt, synthetic construct
  source 1..153: mol_type = other RNA
acagaaaaggatcatcatcgttaagatgtttaattaactaatagttctttgaatatttgatgaaataatgtgagtggaacataaataataaagtgagacaccttaaaattatggaaaatttcactatcctttcgaaagaaggggtaaaacagg

SEQ ID NO: 6577 - RNA, 136 nt, synthetic construct
  source 1..136: mol_type = other RNA
acagaaatcatcgttaagatgtttaattaactaatagttctttgaatatttgatgaaataatgtgagtggaacataaataataaagtaaaattatggaaaatttcactatcctttcgaaagaaggggtaaaacagg

SEQ ID NO: 6578 - RNA, 157 nt, synthetic construct
  source 1..157: mol_type = other RNA
acagaaaaggatttgttatcctacattgtttaattaactaatagttctttgaataaaataatgtgagtggaacataaataataaagtgttaggtaacagagacaccttaaaattatggaaaatttcactatcctttcgaaagaaggggtaaaacagg

SEQ ID NO: 6579 - RNA, 154 nt, synthetic construct
  source 1..154: mol_type = other RNA
acagaaaaggatttgttatcctacatcatcgttaagatgtttaattaactaatagttctttgaatatttgatgaaataatgataaataataaagtgttaggtaacagagacaccttaaaattatctatcctttcgaaagaaggggtaaaacagg

SEQ ID NO: 6580 - RNA, 153 nt, synthetic construct
  source 1..153: mol_type = other RNA
acatcatcgttaagatgtttaattaactaatagttctttgaatatttgatgaaataatgtgagtggaacataaataataaagtgttaggtaacagagacaccttaaaattatggaaaatttcactatcctttcgaaagaaggggtaaaacagg

SEQ ID NO: 6581 - RNA, 146 nt, synthetic construct
  source 1..146: mol_type = other RNA
acagaaaaggatttgttatcctacatcatcgttaagatgtttaattaactaatagttctttgaatatttgatgaaataatgtgagtggaacataaataataaagtgttaggtaacagagacaccttaaaattatggaaaatttcac

SEQ ID NO: 6582 - RNA, 4108 nt, synthetic construct
  source 1..4108: mol_type = other RNA
actcttctggtccccacagactcagagagaacccaccatggcccctaagaagaagagaaaagtcggcggaggcggcagcttcaacaacttcatcaagaagtacagcctgcagaaaaccctgcgcttcgagctgaagcctgtgggcgagacagccgactacatcgaggacttcaagagcgagtacctgaaggacaccgtgctgaaggacgagcagagagccaaggactaccaagagatcaagaccctgatcgacgattaccaccgcgagtacatcgaagagtgcctgagagaacccgtggacaagaaaaccggcgagatcctggacttcacccaggacctggaagatgccttcagctactaccagaagctgaaagagaaccccaccgagaacagagtcggctgggagaaagagcaagagagcctgaggaagaagctggtcacctccttcgtgggcaacgacggcctgttcaagaaagagttcatcaccagggacctgcctgagtggctgcagaagaaaggactctggggcgagtacaaggacacagtggaaaacttcaagaagttcaccacctacttcagcggcttccacgagaaccggaagaacatgtacaccgccgaggctcagagcaccgctatcgccaacagactgatgaacgacaacctgcctaagttctttaacaactacctggcctaccagaccatcaaagagaagcaccccgacctggtgttcagactggatgatgctctgctgcaggccgctggcgtggaacatctggatgaggctttccagcctagatacttcagcagactgttcgcccagagcggcatcaccgctttcaacgagctgatcggcggcagaaccacagagaacggcgagaagatccagggcctgaacgagcagatcaacctgtacagacagcagaaccccgagaaggccaagggcttccccagattcatgcctctgttcaagcagatcctgagcgacagagagacacacagctttctgcccgacgccttcgagaacgacaaagagctgctccaggctctgagagactacgtggacgccgccacatctgaggaaggcatgatcagccagctgaacaaggccatgaaccagttcgtgaccgccgacctgaagagagtgtacatcaagagcgccgctctgaccagcctgagccaagagctgttccacttcttcggcgtgatcagcgacgctatcgcttggtacgccgagaagagactgagccccaagaaggcccaagagtctttcctgaagcaagaggtgtacgccatcgaggaactgaaccaggctgtcgtgggctacatcgaccagctggaagatcagagcgagctgcagcaactgctggtggacctgccagatcctcagaaacccgtgtccagcttcatcctgacacactggcagaagtctcaagagcccctgcaggcagtgatcgccaaggtggaacctctgttcgaactggaagaactgagcaagaacaagagggccccaaagcacgacaaggaccaaggcggcgagggatttcagcaggtcgacgccatcaagaacatgctggacgccttcatggaagtgtcccacgctatcaagcccctgtacctggtcaagggaagaaaggccatcgacatgcccgacgtggacaccggcttctacgctgatttcgccgaggcctacagcgcctacgagcaagtgacagtgtccctgtacaacaagaccagaaaccacctgtccaagaagcccttcagcaaggacaagatcaagatcaacttcgacgcccctacactgctgaacggctgggacctgaacaaagagagcgacaacaagtccatcatcctgcggaaggacggcaacttctacctggcaatcatgcaccccaagcacaccaaggtgttcgactgctactctgcctctgaggctgccggcaagtgctacgagaagatgaactacaagctgctgagcggcgccaacaagatgctgcctaaggtgttctttagcaagaagggcatcgagacattcagccctccacaagaaatcctggacctgtacaagaacaacgagcataagaagggcgccaccttcaagctggaatcctgccacaagctgatcgatttcttcaagcggaacatccccaagtacaaggtgcaccctaccgacaactttggctgggacgtgttcggctttcacttcagccctaccagcagctacggcgacctgtctggcttctacagagaggtggaagcccagggatacaagctgtggttcagcgacgtgtccgaggcttacatcaacaaatgcgtggaagagggcaagctgttcctgttccaaatctacaacaaggacttctcccctaactccaccggcaagcccaacctgcacaccctgtattggaagggcctgttcgagcccgagaacctgaaagacgtggtgctgaagctgaatggcgaggccgagatcttctaccggaagcacagcatcaagcacgaggacaagaccatccacagagctaaggaccctatcgctaacaagaacgctgacaaccccaagaaacagagcgtgttcgattacgacatcatcaaggataagcggtatacccaggacaagttcttcttccacgtgccaatcagcctgaacttcaaaagccagggcgtcgtgcggttcaacgataagatcaacggcctgctggccgctcaggacgatgtgcatgtgatcggcatcgacagaggcgagagacatctgctgtactacaccgtggtcaacggcaagggcgaagtggtggaacagggcagcctgaatcaggtggccacagatcagggctacgtggtggattaccagcagaagctgcacgccaaagagaaagaacgcgaccaggccagaaagaactggtccaccatcgagaacatcaaagaactgaaggccggctacctgagccaggtggtgcataagctggctcagctgatcgtgaagcacaacgccatcgtgtgcctcgaggacctgaatttcggcttcaagaggggcagattcaaggtcgagaaacaggtgtaccagaagttcgagaaggctctgatcgacaagctgaactacctcgtgttcaaagagagaggcgccacacaggctggcggatacctgaatgcttaccagctggccgcacctttcgagagctttgagaagctgggcaagcagaccggcatcctgtactacgtgcggagcgactacaccagcaagatcgaccctgctaccggcttcgtggactttctgaagcctaagtacgagagcatggccaagagcaaagtgttcttcgagtccttcgagcgcatccagtggaaccaggccaaaggctacttcgagttcgagtttgactacaagaagatgtgccccagcagaaagttcggcgactacagaaccagatgggtcgtgtgcaccttcggcgacacccgctaccagaacagaagaaacaagagcagcggccagtgggagacagagacaatcgatgtgacagcccagctgaaagccctgttcgccgcttacggcatcacatacaatcaagaggataacatcaaggacgccattgccgccgtgaagtacaccaagttctacaagcagctgtactggctgctgagactgaccctgagcctgagacacagcgtgacaggcaccgacgaggatttcatcctgtctccagtggccgacgagaatggcgtgttctttgactctaggaaggccaccgacaagcagcctaaggacgctgatgctaacggcgcctaccatatcgccctgaaaggcctgtggaatctccagcagatcagacagcacgactggaacgtggaaaagcccaaaaagctgaacctcgccatgaagaacgaagagtggttcggcttcgctcagaagaagaagtttagagccagcggcggcaagaggcctgccgctacaaaaaaagccggccaggccaagaaaaagaagtgagctcgctttcttgctgtccaatttctattaaaggttcctttgttccctaagtccaactactaaactgggggatattatgaagggccttgagcatctggattctgcctaataaaaaacatttattttcattgc

SEQ ID NO: 6583 - RNA, 4108 nt, synthetic construct
  source 1..4108: mol_type = other RNA
actcttctggtccccacagactcagagagaacccaccatggcgccgaagaagaagcgcaaggtgggggggggcgggtcattcaacaacttcattaagaagtactcgctgcagaagacgttgcggttcgaactgaagccggtgggggagaccgccgactacatcgaggacttcaagtcggagtacttgaaggacacggttcttaaggacgagcagcgcgccaaggactaccaggagatcaagacgctgatcgacgactaccacagggaatacatcgaagaatgcctgagagaaccggtggacaagaagacgggggagattctggacttcacgcaggacctggaagacgccttctcgtactaccagaagctgaaggagaacccgacggagaaccgcgtagggtgggagaaggaacaagaatcgctgcgcaagaagctggttacgtcgttcgtggggaacgacgggctgttcaagaaggaattcatcacgcgcgatctcccggaatggctgcagaagaaggggctatggggggaatacaaggacacggtggagaacttcaagaagttcacgacgtacttctcggggttccacgagaaccgcaagaacatgtacacggccgaagcgcagtccacggccatcgccaaccgcctgatgaacgacaatctgccgaagttcttcaacaactacctggcctaccagacgatcaaggagaagcaccctgaccttgtgttccgcctggacgacgctctgttacaggccgctggagtggaacatctggacgaagcattccagccgagatacttctcacgactgttcgcccaatcggggatcactgccttcaacgaactgatcggggggcgcacaacggagaacggggagaagattcaggggctgaacgaacagatcaacctgtaccgccagcagaatccggagaaggctaaggggttcccacgcttcatgccgctgttcaagcagatcctgtcggaccgcgagacacactcgttcttaccggacgccttcgagaacgacaaggaattactacaggccctacgcgactatgtggacgccgccacgtcggaagaagggatgatctcgcagcttaacaaggccatgaaccagttcgtgacggctgacctgaagcgcgtgtacatcaagtcagccgcccttacttcgctgtcgcaggaactgttccacttcttcggtgtgatctcggacgccatcgcttggtatgccgagaagcgcctgtcgccgaagaaggcccaggaatcgttcctgaagcaagaagtgtacgccatagaagaactcaaccaggccgtggtggggtacatcgaccagctggaagaccagtcggaattacagcagctactggtcgatctgccagacccgcagaagccggttagttcgttcatcctgacgcactggcagaagtcgcaggaacctcttcaggccgtgatcgccaaggtagaacccctgttcgaactggaagaactgtcgaagaacaagcgcgcaccgaagcacgacaaggatcaggggggcgaagggttccagcaggtggacgcaatcaagaatatgcttgacgccttcatggaagtgtcgcacgccatcaagccgctgtacctggtgaaggggcgcaaggctatagatatgccggatgtggacacgggattctacgccgacttcgccgaagcctactcggcatatgaacaggtaacggtgagcctgtacaacaagacgcgcaaccacctgtcgaagaagccgttctcgaaggacaagatcaagatcaacttcgacgccccgacgctgttgaacgggtgggacctcaacaaggaatcggacaacaagtcgatcatcctgcgcaaggacgggaacttctacctggccatcatgcacccgaagcatacgaaggtgttcgactgctactcggcctcggaagccgccggtaagtgctacgagaagatgaactacaagctgctgagcggggccaacaagatgctgccgaaggtcttcttctcgaagaaggggatcgagacgttctcgccgccgcaggagatcctggacctgtacaagaacaacgaacacaagaagggggccacgttcaagctggaatcgtgccacaagctgatcgacttcttcaagcgcaacatcccgaagtacaaggtgcacccgacggacaacttcggctgggacgtgttcgggttccacttctcgcctacatcatcgtacggggatctgtccgggttctaccgcgaagttgaagcccaggggtacaagctgtggttctcggacgtgtcggaagcctacatcaacaagtgcgtggaagaagggaagctgttcctgttccagatctacaacaaggacttctcgccgaacagtacggggaagcccaacctgcatacgctgtactggaaggggctattcgaaccggagaacctgaaggacgtggtgctgaagctgaacggggaagccgagatcttctaccgcaagcactcgatcaagcacgaagacaagacgatccaccgcgccaaggacccgatcgccaacaagaacgcggacaacccgaagaagcagtcggtgttcgactacgacatcatcaaggacaagcggtacacgcaggacaagttcttcttccacgtgccgatcagcctgaacttcaagtcgcagggtgtggtgcgcttcaacgacaagattaacgggctgctggccgcccaagacgacgtgcacgtgatcggtatagatcgcggtgaacgccatctgctgtactacactgtggtgaacgggaagggggaagtagtggaacaggggtcgttgaaccaagtggcaactgaccaggggtacgtggtggactaccagcagaagctgcacgccaaggagaaggaacgcgatcaggccaggaagaactggtcgacgatcgagaacatcaaggaactcaaggccgggtacctgagtcaggtggtgcacaagctggcccagctgatcgtgaagcacaacgccatcgtgtgccttgaagacctgaacttcgggttcaagcgcgggcgcttcaaggtggagaagcaggtgtaccagaagttcgagaaggctctgatcgacaagctgaactacctggtgttcaaggaacgcggggcaacgcaggccgggggatatctgaacgcgtatcaattagccgccccgttcgaatccttcgagaagttggggaagcagacgggaatactgtactacgtgcgctcggactacacgtcgaagatcgacccggcaacggggttcgtggacttcctgaagccgaagtacgagtcgatggccaagtcgaaggtgttcttcgaatcgttcgaacgcatccagtggaaccaggccaaggggtacttcgagttcgaattcgactacaagaagatgtgcccgtcgcgcaagttcggagattaccgaacgcgctgggtcgtgtgcacgttcggagacacgcgctaccagaatcgccggaataagtcgtctggtcaatgggagacggagacgattgacgtgacggctcagctgaaggctctgttcgccgcctacgggatcacctacaaccaggaagacaacatcaaggacgccatcgccgccgtgaagtacacgaagttctacaagcagctatactggctgctgcgcctcacgctgtcgctgagacactcggtgacgggaacggatgaagacttcatcctgtctccggtggcagatgagaacggggtgttcttcgactctaggaaggccacggataagcagccgaaggacgctgacgccaacggtgcctatcacatcgccttgaagggtctgtggaatctgcagcagatccgtcagcacgactggaacgtggagaagccgaagaagctgaacctggccatgaagaatgaagaatggttcgggttcgcccagaagaagaagttccgcgcctctggtgggaagcgtccggccgccacgaagaaggctggtcaggctaagaagaagaagtgagctcgctttcttgctgtccaatttctattaaaggttcctttgttccctaagtccaactactaaactgggggatattatgaagggccttgagcatctggattctgcctaataaaaaacatttattttcattgc

SEQ ID NO: 6584 - RNA, 4108 nt, synthetic construct
  source 1..4108: mol_type = other RNA
actcttctggtccccacagactcagagagaacccaccatggccccgaagaagaagcgcaaggtggggggtggggggtcgttcaacaacttcatcaagaagtactcgcttcagaagacgctccgcttcgaattgaagccggtgggggagaccgccgactacatcgaagacttcaagtcggaatacctgaaggacacggtgctgaaggacgaacagcgcgccaaggactaccaggagatcaagacgctgatcgacgactaccaccgcgaatacatcgaagaatgcctgcgcgaaccggtggacaagaagacgggggagatcctggacttcacgcaggacctggaagacgccttctcgtactaccagaagctgaaggagaacccaacggagaaccgcgttgggtgggagaaggaacaggaatcactgcgcaagaagctggtgacgtcgttcgtggggaacgatgggctgttcaagaaggaattcatcacgcgcgacctgcccgaatggcttcagaagaaggggctgtggggggaatacaaggacacggtggagaacttcaagaagttcacgacgtacttctcggggttccacgagaatcgcaagaacatgtacacggccgaagcccagtcgacggccatcgccaaccgcctgatgaacgacaacctgccgaagttcttcaacaactacctcgcctaccagacgatcaaggagaagcacccggacctagtgttccgactggatgacgctctgttacaggccgctggggtggaacacttggatgaagccttccagccgcgctacttcagtcgcctattcgcccagtcgggtataacggccttcaacgaattaatcggggggcgaacgactgagaacggggagaagatccaggggctgaacgaacagatcaatctgtaccgccaacagaacccggagaaggctaaggggttcccgcgcttcatgccgctgttcaagcagatcctgtcggatcgcgagacacactcgttcttaccggacgccttcgagaacgacaaggaattgctgcaagctctgcgcgactacgtggatgccgccacgtcggaagaaggcatgatctcgcagctgaacaaggccatgaaccaattcgtgacggccgacttgaagcgcgtgtacatcaagtcggctgccctgacgtctctgagtcaggaattgttccacttcttcggggtgatcagtgacgccatcgcctggtacgccgagaagcggttgtcgccgaagaaggcccaggagagcttcctgaagcaggaagtgtacgctattgaagaactgaaccaggccgtggtggggtacatcgaccagctggaagaccagagtgaactgcagcagctgctggttgacctaccagatccgcagaagccggtgtcatcgttcatcctgacgcactggcagaagtcgcaagaacctctgcaggctgtgatcgccaaggtggaaccgctgttcgaactggaagaactgtcgaagaacaagagagccccgaagcacgataaggaccagggtggggaagggttccagcaggtggatgccatcaagaatatgctggacgccttcatggaagtgtcgcacgccattaagccgctgtacctggtgaaggggcgtaaggccatcgacatgccggatgtggatacagggttctacgcagacttcgccgaagcctactcggcctacgaacaggtgacggtgtcgctgtacaacaagacgcgcaaccacctgtcgaagaagccgttctcgaaggacaagatcaagatcaacttcgacgccccgacgctgctgaacgggtgggacctgaacaaggagtcggacaacaagtcgatcatcctgcgcaaggacgggaacttctacctggccatcatgcacccgaagcacacgaaggtgttcgactgctacagtgcatcggaagccgccgggaagtgctacgagaagatgaactacaagctgctgtcgggggccaacaagatgctgccgaaggtgttcttctcgaagaaggggatcgagacgttctcgccgccgcaggagatcctggacctgtacaagaacaacgagcacaagaagggggccacgttcaagctggagtcgtgccacaagctgatcgacttcttcaagcgcaacatcccgaagtacaaggtgcacccgactgacaacttcgggtgggacgtgttcgggttccacttctctccgacatcgtcgtacggggacctctcggggttctatcgcgaagtggaagcacaagggtacaagctgtggttctcggacgtgtccgaggcctacatcaacaagtgcgtggaagaagggaagctcttcctgttccagatctacaacaaggacttctcgccgaactcgacggggaagcccaacctgcacacgctgtactggaaggggctgttcgaaccggagaacctgaaggacgtggtgcttaagctgaacggagaagccgagatcttctaccgcaagcactcgatcaagcacgaagacaagacgatccaccgcgccaaggacccgatcgccaacaagaacgccgacaacccgaagaagcagtcggtgttcgactacgacatcatcaaggacaagcgctacacgcaggacaagttcttcttccacgtgccgatctcgctgaacttcaagagccagggggtagtccgcttcaacgataagatcaatggtctgcttgcagcccaggacgacgtgcacgttatcgggatcgaccgcggggaacgtcacctgctgtactacacggtggtgaacggtaagggagaagtagtggaacaggggtcccttaaccaagtagccacggaccaggggtacgttgtggattaccagcagaagctgcacgccaaggagaaggagagagaccaggccaggaagaactggtccacgatcgagaacatcaaggagctgaaggccgggtacctgtcgcaggtggtgcataagctggcccagctgatcgtgaagcacaacgccattgtgtgcttagaggacctgaacttcgggttcaagcgcggccgcttcaaggtggagaagcaggtgtaccagaagttcgagaaggccctgatagacaagctgaactaccttgtgttcaaggagagaggggcgactcaggccggtgggtaccttaacgcctaccaactggccgccccattcgaatcgttcgagaagctggggaagcagactggaatactgtactacgtgcgctcggactatacgtcgaagatcgacccggccaccggcttcgtggacttcctgaagccgaagtacgaatcgatggccaagtcgaaggtgttcttcgaatcgttcgagcgcatccagtggaaccaggccaaggggtacttcgagttcgaattcgactacaagaagatgtgcccgagccgcaagttcggggattaccgtacgcgctgggtcgtgtgcacgttcggtgatacacgatatcagaaccgcaggaacaagtcttcggggcagtgggagacggagacgatcgacgtgacggcacagctgaaggctctgttcgcggcctacgggatcacttataaccaggaagacaacatcaaggacgcgatcgccgccgtgaagtacacgaagttctacaagcagctgtactggctgctgcgcctgactctgtcgctccggcactcagtgactggaacggatgaagacttcatcctatctccggtggctgatgagaacggggtgttcttcgactcgcgcaaggctacggataagcaaccgaaggatgctgacgccaacggtgcctaccacatcgcccttaaggggctgtggaaccttcagcagatccgccagcacgattggaacgtcgagaagccgaagaagctgaaccttgccatgaagaacgaggaatggttcgggttcgcccagaagaagaagttcagggcctctggggggaagcgccctgccgccactaagaaggctgggcaagctaagaagaagaagtgagctcgctttcttgctgtccaatttctattaaaggttcctttgttccctaagtccaactactaaactgggggatattatgaagggccttgagcatctggattctgcctaataaaaaacatttattttcattgc

SEQ ID NO: 6585 - RNA, 4108 nt, synthetic construct
  source 1..4108: mol_type = other RNA
actcttctggtccccacagactcagagagaacccaccatggcccccaagaagaagcggaaggtgggcggcggcggcagcttcaacaacttcatcaagaagtacagcctgcagaagaccctgcggttcgagctgaagcccgtgggcgagaccgccgactacatcgaggacttcaagagcgagtacctgaaggacaccgtgctgaaggacgagcagcgggccaaggactaccaggagatcaagaccctgatcgacgactaccaccgggagtacatcgaggagtgcctgcgggagcccgtggacaagaagaccggcgagatcctggacttcacccaggacctggaggacgccttcagctactaccagaagctgaaggagaaccccaccgagaaccgggtgggctgggagaaggagcaggagagcctgcggaagaagctggtgaccagcttcgtgggcaacgacggcctgttcaagaaggagttcatcacccgggacctgcccgagtggctgcagaagaagggcctgtggggcgagtacaaggacaccgtggagaacttcaagaagttcaccacctacttcagcggcttccacgagaaccggaagaacatgtacaccgccgaggcccagagcaccgccatcgccaaccggctgatgaacgacaacctgcccaagttcttcaacaactacctggcctaccagaccatcaaggagaagcaccccgacctggtgttccggctggacgacgccctgctgcaggccgccggcgtggagcacctggacgaggccttccagccccggtacttcagccggctgttcgcccagagcggcatcaccgccttcaacgagctgatcggcggccggaccaccgagaacggcgagaagatccagggcctgaacgagcagatcaacctgtaccggcagcagaaccccgagaaggccaagggcttcccccggttcatgcccctgttcaagcagatcctgagcgaccgggagacccacagcttcctgcccgacgccttcgagaacgacaaggagctgctgcaggccctgcgggactacgtggacgccgccaccagcgaggagggcatgatcagccagctgaacaaggccatgaaccagttcgtgaccgccgacctgaagcgggtgtacatcaagagcgccgccctgaccagcctgagccaggagctgttccacttcttcggcgtgatcagcgacgccatcgcctggtacgccgagaagcggctgagccccaagaaggcccaggagagcttcctgaagcaggaggtgtacgccatcgaggagctgaaccaggccgtggtgggctacatcgaccagctggaggaccagagcgagctgcagcagctgctggtggacctgcccgacccccagaagcccgtgagcagcttcatcctgacccactggcagaagagccaggagcccctgcaggccgtgatcgccaaggtggagcccctgttcgagctggaggagctgagcaagaacaagcgggcccccaagcacgacaaggaccagggcggcgagggcttccagcaggtggacgccatcaagaacatgctggacgccttcatggaggtgagccacgccatcaagcccctgtacctggtgaagggccggaaggccatcgacatgcccgacgtggacaccggcttctacgccgacttcgccgaggcctacagcgcctacgagcaggtgaccgtgagcctgtacaacaagacccggaaccacctgagcaagaagcccttcagcaaggacaagatcaagatcaacttcgacgcccccaccctgctgaacggctgggacctgaacaaggagagcgacaacaagagcatcatcctgcggaaggacggcaacttctacctggccatcatgcaccccaagcacaccaaggtgttcgactgctacagcgccagcgaggccgccggcaagtgctacgagaagatgaactacaagctgctgagcggcgccaacaagatgctgcccaaggtgttcttcagcaagaagggcatcgagaccttcagccccccccaggagatcctggacctgtacaagaacaacgagcacaagaagggcgccaccttcaagctggagagctgccacaagctgatcgacttcttcaagcggaacatccccaagtacaaggtgcaccccaccgacaacttcggctgggacgtgttcggcttccacttcagccccaccagcagctacggcgacctgagcggcttctaccgggaggtggaggcccagggctacaagctgtggttcagcgacgtgagcgaggcctacatcaacaagtgcgtggaggagggcaagctgttcctgttccagatctacaacaaggacttcagccccaacagcaccggcaagcccaacctgcacaccctgtactggaagggcctgttcgagcccgagaacctgaaggacgtggtgctgaagctgaacggcgaggccgagatcttctaccggaagcacagcatcaagcacgaggacaagaccatccaccgggccaaagaccccatcgccaacaagaacgccgacaaccccaagaagcagagcgtgttcgactacgacatcatcaaggacaagcggtacacccaggacaagttcttcttccacgtgcccatcagcctgaacttcaagagccagggcgtggtgcggttcaacgacaagatcaacggcctgctggccgcccaggacgacgtgcacgtgatcggcatcgaccggggcgagcggcacctgctgtactacaccgtggtgaacggcaagggcgaggtggtggagcagggcagcctgaaccaggtggccaccgaccagggctacgtggtggactaccagcagaagctgcacgccaaggagaaggagcgggaccaggcccggaagaactggagcaccatcgagaacatcaaggagctgaaggccggctacctgagccaggtggtgcacaagctggcccagctgatcgtgaagcacaacgccatcgtgtgcctggaggacctgaacttcggcttcaagcggggccggttcaaggtggagaagcaggtgtaccagaagttcgagaaggccctgatcgacaagctgaactacctggtgttcaaggagcggggcgccacccaggccggcggctacctgaacgcctaccagctggccgcccccttcgagagcttcgagaagctgggcaagcagaccggcatcctgtactacgtgcggagcgactacaccagcaagatcgaccccgccaccggcttcgtggacttcctgaagcccaagtacgagagcatggccaagagcaaggtgttcttcgagagcttcgagcggattcagtggaaccaggccaagggctacttcgagttcgagttcgactacaagaagatgtgccccagccggaagttcggcgactaccggacccggtgggtggtgtgcaccttcggcgacacccggtaccagaaccggcggaacaagagcagcggccagtgggagaccgagaccatcgacgtgaccgcccagctgaaggccctgttcgccgcctacggcatcacctacaaccaggaggacaacatcaaggacgccatcgccgccgtgaagtacaccaagttctacaagcagctgtactggctgctgcggctgaccctgagcctgcggcacagcgtgaccggcaccgacgaggacttcatcctgagccccgtggccgacgagaacggcgtgttcttcgacagccggaaggccaccgacaagcagcccaaggacgccgacgccaacggcgcctaccacatcgccctgaagggcctgtggaacctgcagcagatccggcagcacgactggaacgtggagaagcccaagaagctgaacctggccatgaagaacgaggagtggttcggcttcgcccagaagaagaagttccgggccagcggcggcaagcggcccgccgccaccaagaaggccggccaggccaagaagaagaagtgagctcgctttcttgctgtccaatttctattaaaggttcctttgttccctaagtccaactactaaactgggggatattatgaagggccttgagcatctggattctgcctaataaaaaacatttattttcattgc

SEQ ID NO: 6586 - RNA, 4108 nt, synthetic construct
  source 1..4108: mol_type = other RNA
actcttctggtccccacagactcagagagaacccaccatggctcctaagaagaagaggaaggtcggcggtggtggtagcttcaacaacttcattaagaagtattcccttcagaagacgctccggttcgagctgaagcctgtgggcgagacggctgactacatcgaggacttcaagtccgagtacctgaaggacacggtgctcaaggacgagcagagagccaaggactaccaggagattaagacattgattgacgactaccaccgggaatacatagaggagtgcctgagagagcccgtcgacaagaagaccggcgagattctcgacttcactcaagacctcgaggatgcgttctcttattaccagaagttgaaggagaacccgactgagaaccgggtgggatgggagaaggagcaagagtctctccggaagaagctcgtaacttcattcgttggtaacgacggcctgttcaagaaggagttcatcactagggacctgcccgaatggcttcagaagaaggggctgtggggggaatacaaggacacggtagagaacttcaagaagttcacaacgtacttcagcgggttccacgagaaccggaagaacatgtacaccgccgaagcccaatccacggcgatcgcgaaccgtctcatgaacgacaaccttccgaagttcttcaacaactacttagcgtaccagacgatcaaggagaagcacccagatctcgtgttccgcctggatgacgctctgttacaggctgctggcgtagaacatcttgatgaggcgttccaacccaggtacttctcacgactgttcgctcagtctggaattactgccttcaatgagctcatcggcgggcgtacgactgagaacggcgagaagattcagggactgaacgagcagattaatctgtatcggcagcagaatcccgagaaggctaaggggttccctcggttcatgccgttgttcaagcagatcttgtcagatcgtgagacgcacagcttcctgccagatgcgttcgagaatgataaggaactccttcaggctctccgagactatgtggacgccgcgactagcgaagaaggcatgatctcccaactgaataaggcgatgaaccagttcgttaccgcggacttgaagcgtgtgtacatcaagagtgccgcgctgaccagcctctctcaagagttattccacttcttcggcgtgatatcagacgccatcgcgtggtatgccgagaagagactgagtcctaagaaggcccaagaatccttcctcaagcaagaggtctacgccatagaagaactcaaccaggctgtggtcggctacattgaccagctcgaagaccagagtgaactgcaacagttactggtggatctcccagatccacagaagccagttagctccttcatccttacccattggcagaagagccaagagccgctccaagctgtcattgccaaggtagagccgctgttcgagttagaggagctcagtaagaataagagggcgcccaagcatgataaggatcagggtggcgaagggttccaacaagtcgacgccatcaagaacatgctggacgcattcatggaagtatcacacgccatcaagcccctgtatctggttaagggacgcaaggccatagacatgccagatgtcgacacaggcttctatgctgacttcgctgaagcctactctgcgtacgaacaggtcacggtgtcactgtacaacaagacccggaaccatctcagcaagaagcccttcagcaaggacaagatcaagatcaacttcgacgcgcccacactgctgaatgggtgggacttgaacaaggagtccgacaacaagtccatcatactgcggaaggatggtaacttctacctcgccattatgcaccccaagcacacgaaggtcttcgactgctacagtgcttctgaagccgccgggaagtgttatgagaagatgaactacaagctgctgtccggagcgaacaagatgctccccaaggtgttcttcagcaagaagggaatcgagaccttcagcccacctcaggagatcttggacctgtacaagaacaacgagcacaagaagggggccaccttcaagctcgagtcttgtcacaagctgatcgacttcttcaagcgcaacatccccaagtacaaggtgcatccgacagataacttcggttgggacgtgttcgggttccacttcagccctaccagctcttatggggatctgtcaggcttctatagagaggtggaagcacaaggatacaagctgtggttcagcgacgttagcgaggcgtacatcaacaagtgcgtggaagagggcaagctcttcctgttccagatctacaacaaggacttcagtcccaacagcaccggtaagcctaaccttcacaccttgtactggaaggggttgttcgaacccgagaacctgaaggatgtagtactcaagctgaacggagaggccgagatcttctaccgcaagcactctattaagcacgaggacaagaccatacacagggccaaggaccctatcgccaataagaacgccgacaacccgaagaagcagagcgtgttcgactacgacatcattaaggacaagcgctacacgcaggacaagttcttcttccacgtgcccatctcccttaacttcaagtcccagggagtcgtccggttcaacgacaagattaatgggctgcttgctgcccaggatgacgtgcacgtgataggaattgacaggggcgaacgccacctgttgtattataccgtcgttaatggcaagggagaggttgtagaacagggctctctgaatcaggttgccaccgatcagggctacgtggtcgactatcagcagaagttacatgcgaaggagaaggaacgtgatcaggcgcgcaagaactggtccaccatcgagaatatcaaggagcttaaggccgggtacctgtcacaagttgtgcacaagctggcacagctgattgtcaagcacaacgcaatcgtgtgccttgaggatctcaacttcgggttcaagcgcggccgcttcaaggtggagaagcaggtgtatcagaagttcgagaaggccttgattgacaagctgaactaccttgtgttcaaggagaggggcgcaacacaagcggggggctatctgaatgcctatcagttggcagctccgttcgaatccttcgagaagctggggaagcagacaggaatcctgtactacgttcgatctgactacacgtccaagattgatcctgctaccgggttcgtggacttcttgaagcccaagtacgagagcatggccaagagtaaggtgttcttcgagtcattcgagcgcatccagtggaaccaagcgaagggctacttcgagttcgagttcgactacaagaagatgtgtccttcccggaagttcggcgattacaggaccaggtgggttgtgtgtacgttcggtgatacgcgataccagaatcgaaggaacaagagcagtggacagtgggagacggagactattgatgtcaccgctcagcttaaggccctgttcgccgcatacggtattacgtacaatcaagaggataacatcaaggacgcgatcgccgccgtgaagtacaccaagttctacaagcagctgtactggctccttcggctgactctgtcactcagacatagtgttaccggcacggatgaagacttcatcctgagtccagtggctgacgagaatggagtgttcttcgattctcgtaaggccaccgataagcagcctaaggatgccgatgctaatggagcatatcacatcgccctgaagggactgtggaacttgcagcagatccgacagcatgattggaacgtcgagaagccgaagaagttgaaccttgcgatgaagaacgaggagtggttcgggttcgctcagaagaagaagttcagagcctctggtggtaagaggccagctgctactaagaaggctggacaagctaagaagaagaagtgagctcgctttcttgctgtccaatttctattaaaggttcctttgttccctaagtccaactactaaactgggggatattatgaagggccttgagcatctggattctgcctaataaaaaacatttattttcattgc

SEQ ID NO: 6587 - RNA, 4108 nt, synthetic construct
  source 1..4108: mol_type = other RNA
actcttctggtccccacagactcagagagaacccaccatggctcctaagaagaagaggaaggtcggtggcggtggctccttcaataacttcattaagaagtacagcctgcagaagactctccgcttcgaactcaagcccgtgggggagacggcggactacattgaggacttcaagtccgagtacctgaaggacacagtgttgaaggacgagcagagggcgaaggactaccaggagatcaagaccctcatagatgactaccacagggaatacattgaggagtgcctgcgagaaccagtcgacaagaagacgggtgagatccttgacttcacccaggacctcgaagacgccttcagttactatcagaagctcaaggagaaccctactgagaacagagtcgggtgggagaaggagcaagagtccctgcgtaagaagttggtcacttccttcgttggcaacgatgggctcttcaagaaggagttcataacccgagatctccctgaatggctgcagaagaagggcctgtggggagagtacaaggacaccgtggagaacttcaagaagttcaccacatacttctccgggttccatgagaaccgcaagaacatgtacacggccgaagcacagagtacagccatcgccaaccgcttgatgaacgacaatctgcccaagttcttcaacaactacctggcgtatcagactatcaaggagaagcaccccgatctggtgttcaggctggacgatgcactgctgcaagccgcaggagttgaacatctcgatgaagccttccaaccaaggtacttctctcgactgttcgcccaatctggcataacggccttcaatgaactgattggcgggcgtacgaccgagaacggcgagaagattcagggccttaatgaacagattaacctgtaccgtcagcagaatccagagaaggccaagggcttcccacgcttcatgcccctgttcaagcagattctgtctgacagggagacccattcattcttgcccgatgccttcgagaacgacaaggagttgttgcaagctctgcgcgactatgttgacgccgccacatccgaagaaggcatgatcagccaactcaacaaggctatgaaccagttcgtaacagccgacctgaagcgtgtgtacatcaagtctgcggccctgacatctctcagccaagaactgttccacttcttcggagtgatatctgatgcaattgcatggtacgcggagaagcgactctcccccaagaaggcccaggagtcattccttaagcaggaagtctacgcgatcgaagaactcaaccaggccgtagttggttacatcgaccagctggaagatcagtccgaactgcagcaactgctcgtggatctcccagatcctcagaagcctgttagtagcttcattctcacacattggcagaagtcccaggagcctctgcaggccgttattgcgaaggtagaacccctgttcgagcttgaagagctcagtaagaataagcgggcccctaagcatgataaggatcagggcggtgaggggttccagcaggtggatgctattaagaacatgcttgacgcgttcatggaagtctcacacgcgatcaagcccctgtacctcgttaaggggcgtaaggctatcgatatgcccgatgtggatactggcttctatgccgacttcgctgaagcctactctgcatacgagcaggtcaccgttagcctctacaataagacccgcaaccacctcagcaagaagcccttctccaaggacaagatcaagatcaacttcgacgcccccacccttctgaatgggtgggacctgaacaaggagtccgataacaagtcaatcatcctgcggaaggacggcaacttctacctcgccataatgcaccccaagcatacgaaggtcttcgactgctacagtgcttcagaggcagcgggcaagtgctatgagaagatgaactacaagttgttgagcggcgctaacaagatgctgccgaaggtcttcttcagcaagaagggcatcgagaccttctcaccgccacaggagattcttgacctctacaagaacaacgagcacaagaagggggcgaccttcaagctggagtcttgccacaagctgatcgacttcttcaagcgcaacatacccaagtacaaggtgcatccaaccgacaacttcgggtgggatgtgttcgggttccacttctctcctactagcagctatggagatctgagtgggttctatagagaagtagaggcccagggctacaagctgtggttcagcgacgtctcagaggcctatatcaacaagtgcgtggaagaagggaagctcttcctgttccagatctacaacaaggacttctcccccaattccaccgggaagcccaacttgcacacactctattggaagggtctgttcgagccagagaatctcaaggacgtggttctgaagctgaatggcgaagcggagatcttctaccggaagcactccatcaagcacgaggacaagactattcacagggctaaggacccgatcgctaacaagaacgccgataacccgaagaagcagagcgtgttcgactacgacatcatcaaggacaagcggtacacgcaggacaagttcttcttccacgtgccgatcagccttaacttcaagagccagggggtggtgaggttcaacgataagattaatgggttgctggcggcgcaggatgatgtgcacgtgatcggaatagaccggggggagagacatcttctgtactacactgtagtgaacgggaagggtgaggtggtcgaacagggctcacttaatcaagtcgctaccgatcagggctatgtggtggattaccaacagaagttgcacgccaaggagaaggaacgcgatcaggctcggaagaactggagcaccattgagaacatcaaggaactgaaggccggctacctcagtcaagtggtccataagctcgcccagctcatagtcaagcataatgccattgtgtgtctcgaggatctgaacttcgggttcaagcgcggccgcttcaaggtggagaagcaagtgtaccagaagttcgagaaggctctgattgacaagctcaactaccttgtgttcaaggaacgaggagccacacaagccggcggctacttgaatgcctaccaactcgcggccccgttcgaatccttcgagaagttgggtaagcagactggaatcctgtattacgttcggagcgactatacctctaagatcgacccggctaccggcttcgtcgacttccttaagcctaagtatgagagcatggctaagagcaaggtgttcttcgagtccttcgagcgtatccagtggaaccaggccaagggctacttcgagttcgagttcgattacaagaagatgtgtccatccaggaagttcggagactatcggactcggtgggttgtgtgcaccttcggtgacacacgataccagaaccgtaggaacaagagttctggacaatgggagacggagaccatcgacgttacagctcagttgaaggctctcttcgccgcctatggtatcacctacaaccaggaagataacatcaaggacgcaatcgccgccgtcaagtacaccaagttctacaagcagctctactggctgctgcggcttacacttagtctccggcattctgtaaccggaacagacgaggacttcattctcagccccgtagctgatgagaatggagtgttcttcgactctcgcaaggcgactgataagcagcctaaggatgctgatgcgaatggagcctaccatattgctctgaagggcctctggaatctgcagcagattaggcaacacgactggaacgtggagaagcctaagaagctcaacctggctatgaagaacgaggagtggttcgggttcgctcagaagaagaagttcagagcttcagggggtaagagacctgcagctactaagaaggctggacaagctaagaagaagaagtgagctcgctttcttgctgtccaatttctattaaaggttcctttgttccctaagtccaactactaaactgggggatattatgaagggccttgagcatctggattctgcctaataaaaaacatttattttcattgc

SEQ ID NO: 6588 - RNA, 4108 nt, synthetic construct
  source 1..4108: mol_type = other RNA
  modified_base 1..3: mod_base = OTHER; note = 2'O-Methyl ribonucleotide
  modified_base 1..3: mod_base = OTHER; note = Phosphorothioate linkage
  modified_base 10..13: mod_base = OTHER; note = Phosphorothioate linkage
  modified_base 11..14: mod_base = OTHER; note = 2'O-Methyl ribonucleotide
  modified_base 24..28: mod_base = OTHER; note = Phosphorothioate linkage
  modified_base 25..27: mod_base = OTHER; note = 2'O-Methyl ribonucleotide
  modified_base 34..37: mod_base = OTHER; note = 2'O-Methyl ribonucleotide
  modified_base 39..42: mod_base = OTHER; note = Phosphorothioate linkage
  modified_base 56..67: mod_base = OTHER; note = 2'Fluorine ribonucleotide
  modified_base 65..67: mod_base = OTHER; note = Phosphorothioate linkage
  modified_base 68: mod_base = OTHER; note = 2'O-Methyl ribonucleotide
actcttctggtccccacagactcagagagaacccaccatggcacccaagaagaagcgtaaggttggcggtggtggttccttcaacaacttcattaagaagtatagtctgcagaagaccctgcggttcgagctgaagccggtgggcgagacagccgactacattgaggacttcaagtccgagtacctcaaggacaccgttctcaaggacgagcaacgcgccaaggactatcaggagatcaagactctgatcgatgactaccatcgcgagtacatcgaggaatgcttgcgcgagccagtggacaagaagacaggagagattctggacttcacacaggacctcgaggatgcattcagctactaccagaagctcaaggagaacccaaccgagaatcgcgttggttgggagaaggaacaggagtcactgcggaagaagctcgtgacgtccttcgttggtaatgacgggctcttcaagaaggaattcattactcgcgatctacccgaatggctgcagaagaaggggctgtggggcgagtacaaggacaccgtggagaacttcaagaagttcaccacctacttctctggcttccatgagaaccggaagaacatgtacaccgctgaagcccagtcaaccgccattgctaaccgtctcatgaacgacaacctgcccaagttcttcaacaactacctcgcttaccagacgatcaaggagaagcacccggatcttgtgttcaggctggatgatgctcttctgcaggcagccggcgtggaacatcttgatgaagccttccaacccagatacttctcccgactgttcgctcagtctggtatcacagccttcaatgagttgatcggcggcaggactaccgagaacggcgagaagatccaagggctgaatgaacagatcaacctgtacaggcaacagaatcctgagaaggctaagggcttcccgcggttcatgcccctgttcaagcagatattgagcgacagggagacccactccttcttgcctgatgccttcgagaacgacaaggagttgttgcaagctctcagggattatgtggacgccgccacaagcgaagaggggatgattagccaactcaataaggccatgaaccagttcgtcaccgctgacctcaagcgagtgtacatcaagagtgccgcacttactagcctctctcaggagctgttccacttcttcggcgttatatccgacgcaattgcttggtatgctgagaagcgcctgagtcctaagaaggcccaagagtccttcctgaagcaggaagtgtatgccatcgaggagctgaaccaggcagtcgtcgggtatatcgatcagctggaagatcaatctgaactgcaacagctgctagtggatctgcctgatcctcagaagccggtgagttccttcatcttgacccactggcagaagtctcaggagccactacaggccgtaatcgctaaggtcgaacccctgttcgagttggaagagctaagtaagaacaagagggcccccaagcatgataaggatcagggcggtgagggattccagcaggttgatgccatcaagaacatgttggacgccttcatggaagtgagtcacgctatcaagcctctgtaccttgtgaaggggcgtaaggccatagacatgcccgacgtagatacaggcttctatgcagacttcgcagaagcctactcagcctatgagcaggtgaccgtgtccctgtacaataagacccggaatcacctctccaagaagcccttcagcaaggacaagatcaagatcaacttcgacgcccccacccttctcaatggctgggatctgaacaaggagtccgacaacaagagcataatcctcaggaaggatggcaacttctatctggccatcatgcaccccaagcacaccaaggtgttcgactgctactccgcctctgaagctgctggcaagtgctatgagaagatgaactacaagctactgtcaggcgccaacaagatgctgcccaaggtcttcttcagcaagaagggcattgagacgttctcccccccccaagagattctcgacctgtacaagaacaacgagcacaagaagggggcaaccttcaagctggagagctgccacaagctgatcgacttcttcaagcgcaacatacccaagtacaaggtgcatccgactgacaacttcggctgggatgtcttcgggttccacttctcacctacctcttcatatggcgatcttagtgggttctatcgcgaagtcgaagcacagggctataagctctggttctccgacgtaagcgaggcctacatcaacaagtgcgtggaagagggcaagctcttcctgttccagatctacaacaaggacttctcacccaatagcacaggcaagccgaatctccataccctgtactggaagggtctcttcgaacccgagaacctgaaggatgtggtgctgaagctcaatggcgaggctgagatcttctataggaagcactccattaagcacgaggacaagaccatccaccgagctaaggaccccatcgccaataagaacgctgacaacccgaagaagcagtctgtgttcgactacgacatcatcaaggacaagcgctacacccaggacaagttcttcttccacgtcccgattagcctgaacttcaagtcccagggcgtcgtccgcttcaacgataagatcaatggactcctagctgctcaggacgatgtgcatgtcatcggcatcgaccgtggggaacgtcaccttctgtactatacggtcgttaatggcaagggagaggtcgttgagcaaggatctctgaatcaggttgccaccgatcaggggtacgtggtagactatcagcagaagctgcatgccaaggagaaggagcgcgaccaggcccgtaagaattggtctactatcgagaacattaaggaactcaaggccggatacctcagtcaggtcgtgcacaagctggcccagctgatcgtgaagcacaacgctatcgtgtgtctagaggatctcaacttcggcttcaagagaggccggttcaaggtagagaagcaggtgtaccagaagttcgagaaggccctcatcgacaagctgaattacctcgtcttcaaggagagaggagctacccaagcagggggatatctgaacgcatatcagttggccgcccccttcgaatccttcgagaagctagggaagcagactggaattctctactacgtacggagcgactacacgtccaagattgatcctgccacgggcttcgtagacttccttaagcctaagtacgagtccatggctaagtccaaggtgttcttcgagtccttcgagcgcatacagtggaaccaggctaaggggtacttcgagttcgagttcgactacaagaagatgtgtcctagccggaagttcggagactatcgcactcgctgggtggtgtgtaccttcggcgatacgcgttatcagaatcgacgtaataagagcagcggtcaatgggagacagagacgattgacgtcactgcacagctgaaggcactattcgccgcttacggcattacctacaaccaggaagacaacatcaaggacgccatcgccgccgtcaagtacactaagttctataagcagctctactggctcctgcggctcaccctgtctcttcgacattccgttacaggtacagacgaggacttcatcctgtctccagtcgctgatgagaatggggtcttcttcgatagccgtaaggccactgacaagcaacctaaggatgccgacgctaatggagcctaccatattgcccttaagggcctctggaatcttcagcagattcgtcagcacgactggaacgtcgagaagcctaagaagttgaacctggccatgaagaacgaggaatggttcgggttcgctcagaagaagaagttccgagcttctggtggtaagaggcctgctgctactaagaaggcaggtcaagccaagaagaagaagtgagctcgctttcttgctgtccaatttctattaaaggttcctttgttccctaagtccaactactaaactgggggatattatgaagggccttgagcatctggattctgcctaataaaaaacatttattttcattgc

SEQ ID NO: 6589-6908 - skipped (320 entries)

SEQ ID NO: 6909 - RNA, 68 nt, synthetic construct; identical to SEQ ID NO: 5726
  source 1..68: mol_type = other RNA
  modified_base 1..3: mod_base = OTHER; note = 2'O-Methyl ribonucleotide
  modified_base 1..3: mod_base = OTHER; note = Phosphorothioate linkage
  modified_base 10..13: mod_base = OTHER; note = Phosphorothioate linkage
  modified_base 11..14: mod_base = OTHER; note = 2'O-Methyl ribonucleotide
  modified_base 24..28: mod_base = OTHER; note = Phosphorothioate linkage
  modified_base 25..27: mod_base = OTHER; note = 2'O-Methyl ribonucleotide
  modified_base 34..37: mod_base = OTHER; note = 2'O-Methyl ribonucleotide
  modified_base 39..42: mod_base = OTHER; note = Phosphorothioate linkage
  modified_base 56..67: mod_base = OTHER; note = 2'Fluorine ribonucleotide
  modified_base 65..67: mod_base = OTHER; note = Phosphorothioate linkage
  modified_base 68: mod_base = OTHER; note = 2'O-Methyl ribonucleotide

SEQ ID NO: 6910 - RNA, 68 nt, synthetic construct; identical to SEQ ID NO: 5726
  source 1..68: mol_type = other RNA
  modified_base 1..3: mod_base = OTHER; note = 2'O-Methyl ribonucleotide
  modified_base 1..3: mod_base = OTHER; note = Phosphorothioate linkage
  modified_base 10..13: mod_base = OTHER; note = Phosphorothioate linkage
  modified_base 11..14: mod_base = OTHER; note = 2'O-Methyl ribonucleotide
  modified_base 24..28: mod_base = OTHER; note = Phosphorothioate linkage
  modified_base 25..27: mod_base = OTHER; note = 2'O-Methyl ribonucleotide
  modified_base 34..37: mod_base = OTHER; note = 2'O-Methyl ribonucleotide
  modified_base 39..42: mod_base = OTHER; note = Phosphorothioate linkage
  modified_base 66..67: mod_base = OTHER; note = Phosphorothioate linkage
  modified_base 67..68: mod_base = OTHER; note = 2'O-Methyl ribonucleotide

SEQ ID NO: 6911 - RNA, 68 nt, synthetic construct; identical to SEQ ID NO: 5726
  source 1..68: mol_type = other RNA
  modified_base 1..3: mod_base = OTHER; note = 2'O-Methyl ribonucleotide
  modified_base 1..3: mod_base = OTHER; note = Phosphorothioate linkage
  modified_base 10..13: mod_base = OTHER; note = Phosphorothioate linkage
  modified_base 11..14: mod_base = OTHER; note = 2'O-Methyl ribonucleotide
  modified_base 24..28: mod_base = OTHER; note = Phosphorothioate linkage
  modified_base 25..27: mod_base = OTHER; note = 2'O-Methyl ribonucleotide
  modified_base 34..37: mod_base = OTHER; note = 2'O-Methyl ribonucleotide
  modified_base 39..42: mod_base = OTHER; note = Phosphorothioate linkage
  modified_base 65..67: mod_base = OTHER; note = Phosphorothioate linkage
  modified_base 67..68: mod_base = OTHER; note = 2'O-Methyl ribonucleotide

SEQ ID NO: 6912 - RNA, 68 nt, synthetic construct; identical to SEQ ID NO: 5726
  source 1..68: mol_type = other RNA
  modified_base 1..3: mod_base = OTHER; note = 2'O-Methyl ribonucleotide
  modified_base 1..3: mod_base = OTHER; note = Phosphorothioate linkage
  modified_base 10..15: mod_base = OTHER; note = 2'O-Methyl ribonucleotide
  modified_base 24..28: mod_base = OTHER; note = 2'O-Methyl ribonucleotide
  modified_base 34..37: mod_base = OTHER; note = 2'O-Methyl ribonucleotide
  modified_base 56..57: mod_base = OTHER; note = 2'Fluorine ribonucleotide
  modified_base 59: mod_base = OTHER; note = 2'Fluorine ribonucleotide
  modified_base 65: mod_base = OTHER; note = 2'Fluorine ribonucleotide
  modified_base 66..67: mod_base = OTHER; note = Phosphorothioate linkage
  modified_base 67: mod_base = OTHER; note = 2'Fluorine ribonucleotide
  modified_base 68: mod_base = OTHER; note = 2'O-Methyl ribonucleotide

SEQ ID NO: 6913 - RNA, 68 nt, synthetic construct; identical to SEQ ID NO: 5726
  source 1..68: mol_type = other RNA
  modified_base 1..3: mod_base = OTHER; note = 2'O-Methyl ribonucleotide
  modified_base 1..3: mod_base = OTHER; note = Phosphorothioate linkage
  modified_base 10..15: mod_base = OTHER; note = 2'O-Methyl ribonucleotide
  modified_base 24..28: mod_base = OTHER; note = 2'O-Methyl ribonucleotide
  modified_base 34..37: mod_base = OTHER; note = 2'O-Methyl ribonucleotide
  modified_base 44..47: mod_base = OTHER; note = 2'O-Methyl ribonucleotide
  modified_base 56..57: mod_base = OTHER; note = 2'Fluorine ribonucleotide
  modified_base 59: mod_base = OTHER; note = 2'Fluorine ribonucleotide
  modified_base 65: mod_base = OTHER; note = 2'Fluorine ribonucleotide
  modified_base 66..67: mod_base = OTHER; note = Phosphorothioate linkage
  modified_base 67: mod_base = OTHER; note = 2'Fluorine ribonucleotide
  modified_base 68: mod_base = OTHER; note = 2'O-Methyl ribonucleotide

SEQ ID NO: 6914 - RNA, 68 nt, synthetic construct; identical to SEQ ID NO: 5726
  source 1..68: mol_type = other RNA
  modified_base 1..3: mod_base = OTHER; note = 2'O-Methyl ribonucleotide
  modified_base 1..3: mod_base = OTHER; note = Phosphorothioate linkage
  modified_base 10..15: mod_base = OTHER; note = 2'O-Methyl ribonucleotide
  modified_base 24..28: mod_base = OTHER; note = 2'O-Methyl ribonucleotide
  modified_base 34..37: mod_base = OTHER; note = 2'O-Methyl ribonucleotide
  modified_base 39..42: mod_base = OTHER; note = 2'O-Methyl ribonucleotide
  modified_base 56..57: mod_base = OTHER; note = 2'Fluorine ribonucleotide
  modified_base 59: mod_base = OTHER; note = 2'Fluorine ribonucleotide
  modified_base 65: mod_base = OTHER; note = 2'Fluorine ribonucleotide
  modified_base 65..67: mod_base = OTHER; note = Phosphorothioate linkage
  modified_base 67: mod_base = OTHER; note = 2'Fluorine ribonucleotide
  modified_base 68: mod_base = OTHER; note = 2'O-Methyl ribonucleotide

SEQ ID NO: 6915 - RNA, 68 nt, synthetic construct; identical to SEQ ID NO: 5726
  source 1..68: mol_type = other RNA
  modified_base 1..15: mod_base = OTHER; note = 2'O-Methyl ribonucleotide
  modified_base 1..3: mod_base = OTHER; note = Phosphorothioate linkage
  modified_base 24..28: mod_base = OTHER; note = 2'O-Methyl ribonucleotide
  modified_base 34..37: mod_base = OTHER; note = 2'O-Methyl ribonucleotide
  modified_base 44..47: mod_base = OTHER; note = 2'O-Methyl ribonucleotide
  modified_base 56..57: mod_base = OTHER; note = 2'Fluorine ribonucleotide
  modified_base 59: mod_base = OTHER; note = 2'Fluorine ribonucleotide
  modified_base 65: mod_base = OTHER; note = 2'Fluorine ribonucleotide
  modified_base 65: mod_base = OTHER; note = 2'Fluorine ribonucleotide
  modified_base 67: mod_base = OTHER; note = 2'Fluorine ribonucleotide
  modified_base 66..67: mod_base = OTHER; note = Phosphorothioate linkage
  modified_base 68: mod_base = OTHER; note = 2'O-Methyl ribonucleotide

SEQ ID NO: 6916 - RNA, 68 nt, synthetic construct; identical to SEQ ID NO: 5726
  source 1..68: mol_type = other RNA
  modified_base 1..3: mod_base = OTHER; note = 2'O-Methyl ribonucleotide
  modified_base 1..3: mod_base = OTHER; note = Phosphorothioate linkage
  modified_base 10..28: mod_base = OTHER; note = 2'O-Methyl ribonucleotide
  modified_base 34..37: mod_base = OTHER; note = 2'O-Methyl ribonucleotide
  modified_base 56..57: mod_base = OTHER; note = 2'Fluorine ribonucleotide
  modified_base 59: mod_base = OTHER; note = 2'Fluorine ribonucleotide
  modified_base 65: mod_base = OTHER; note = 2'Fluorine ribonucleotide
  modified_base 65..67: mod_base = OTHER; note = Phosphorothioate linkage
  modified_base 67: mod_base = OTHER; note = 2'Fluorine ribonucleotide
  modified_base 68: mod_base = OTHER; note = 2'O-Methyl ribonucleotide

SEQ ID NO: 6917 - RNA, 68 nt, synthetic construct; identical to SEQ ID NO: 5726
  source 1..68: mol_type = other RNA
  modified_base 1..28: mod_base = OTHER; note = 2'O-Methyl ribonucleotide
  modified_base 1..3: mod_base = OTHER; note = Phosphorothioate linkage
  modified_base 34..37: mod_base = OTHER; note = 2'O-Methyl ribonucleotide
  modified_base 44..47: mod_base = OTHER; note = 2'O-Methyl ribonucleotide
  modified_base 56..57: mod_base = OTHER; note = 2'Fluorine ribonucleotide
  modified_base 59: mod_base = OTHER; note = 2'Fluorine ribonucleotide
  modified_base 65: mod_base = OTHER; note = 2'Fluorine ribonucleotide
  modified_base 65..67: mod_base = OTHER; note = Phosphorothioate linkage
  modified_base 67: mod_base = OTHER; note = 2'Fluorine ribonucleotide
  modified_base 68: mod_base = OTHER; note = 2'O-Methyl ribonucleotide

SEQ ID NO: 6918 - RNA, 68 nt, synthetic construct; identical to SEQ ID NO: 5726
  source 1..68: mol_type = other RNA
  modified_base 1..3: mod_base = OTHER; note = 2'O-Methyl ribonucleotide
  modified_base 1..3: mod_base = OTHER; note = Phosphorothioate linkage
  modified_base 10..15: mod_base = OTHER; note = 2'O-Methyl ribonucleotide
  modified_base 24..37: mod_base = OTHER; note = 2'O-Methyl ribonucleotide
  modified_base 44..47: mod_base = OTHER; note = 2'O-Methyl ribonucleotide
  modified_base 56..57: mod_base = OTHER; note = 2'Fluorine ribonucleotide
  modified_base 59: mod_base = OTHER; note = 2'Fluorine ribonucleotide
  modified_base 65: mod_base = OTHER; note = 2'Fluorine ribonucleotide
  modified_base 65..67: mod_base = OTHER; note = Phosphorothioate linkage
  modified_base 67: mod_base = OTHER; note = 2'Fluorine ribonucleotide
  modified_base 68: mod_base = OTHER; note = 2'O-Methyl ribonucleotide

SEQ ID NO: 6919 - RNA, 68 nt, synthetic construct; identical to SEQ ID NO: 5726
  source 1..68: mol_type = other RNA
  modified_base 1..37: mod_base = OTHER; note = 2'O-Methyl ribonucleotide
  modified_base 1..3: mod_base = OTHER; note = Phosphorothioate linkage
  modified_base 44..47: mod_base = OTHER; note = 2'O-Methyl ribonucleotide
  modified_base 56..57: mod_base = OTHER; note = 2'Fluorine ribonucleotide
  modified_base 59: mod_base = OTHER; note = 2'Fluorine ribonucleotide
  modified_base 65: mod_base = OTHER; note = 2'Fluorine ribonucleotide
  modified_base 65..67: mod_base = OTHER; note = Phosphorothioate linkage
  modified_base 67: mod_base = OTHER; note = 2'Fluorine ribonucleotide
  modified_base 68: mod_base = OTHER; note = 2'O-Methyl ribonucleotide

SEQ ID NO: 6920 - RNA, 68 nt, synthetic construct; identical to SEQ ID NO: 5727
  source 1..68: mol_type = other RNA
  modified_base 1..3: mod_base = OTHER; note = 2'O-Methyl ribonucleotide
  modified_base 1..3: mod_base = OTHER; note = Phosphorothioate linkage
  modified_base 11..14: mod_base = OTHER; note = 2'O-Methyl ribonucleotide
  modified_base 10..13: mod_base = OTHER; note = Phosphorothioate linkage
  modified_base 24..27: mod_base = OTHER; note = 2'O-Methyl ribonucleotide
  modified_base 24..28: mod_base = OTHER; note = Phosphorothioate linkage
  modified_base 34..37: mod_base = OTHER; note = 2'O-Methyl ribonucleotide
  modified_base 39..42: mod_base = OTHER; note = Phosphorothioate linkage
  modified_base 56..67: mod_base = OTHER; note = 2'Fluorine ribonucleotide
  modified_base 65..67: mod_base = OTHER; note = Phosphorothioate linkage
  modified_base 68: mod_base = OTHER; note = 2'O-Methyl ribonucleotide

SEQ ID NO: 6921 - RNA, 68 nt, synthetic construct; identical to SEQ ID NO: 5727
  source 1..68: mol_type = other RNA
  modified_base 1..3: mod_base = OTHER; note = 2'O-Methyl ribonucleotide
  modified_base 1..3: mod_base = OTHER; note = Phosphorothioate linkage
  modified_base 10..13: mod_base = OTHER; note = Phosphorothioate linkage
  modified_base 11..14: mod_base = OTHER; note = 2'O-Methyl ribonucleotide
  modified_base 24..29: mod_base = OTHER; note = 2'O-Methyl ribonucleotide
  modified_base 34..37: mod_base = OTHER; note = 2'O-Methyl ribonucleotide
  modified_base 39..42: mod_base = OTHER; note = Phosphorothioate linkage
  modified_base 65..67: mod_base = OTHER; note = Phosphorothioate linkage
  modified_base 67..68: mod_base = OTHER; note = 2'O-Methyl ribonucleotide

SEQ ID NO: 6922 - RNA, 68 nt, synthetic construct; identical to SEQ ID NO: 5727
  source 1..68: mol_type = other RNA
  modified_base 1..3: mod_base = OTHER; note = 2'O-Methyl ribonucleotide
  modified_base 1..3: mod_base = OTHER; note = Phosphorothioate linkage
  modified_base 10..13: mod_base = OTHER; note = Phosphorothioate linkage
  modified_base 11..14: mod_base = OTHER; note = 2'O-Methyl ribonucleotide
  modified_base 24..28: mod_base = OTHER; note = Phosphorothioate linkage
  modified_base 25..27: mod_base = OTHER; note = 2'O-Methyl ribonucleotide
  modified_base 34..37: mod_base = OTHER; note = 2'O-Methyl ribonucleotide
  modified_base 39..42: mod_base = OTHER; note = Phosphorothioate linkage
  modified_base 56..57: mod_base = OTHER; note = 2'Fluorine ribonucleotide
  modified_base 59: mod_base = OTHER; note = 2'Fluorine ribonucleotide
  modified_base 65: mod_base = OTHER; note = 2'Fluorine ribonucleotide
  modified_base 66..67: mod_base = OTHER; note = Phosphorothioate linkage
  modified_base 67: mod_base = OTHER; note = 2'Fluorine ribonucleotide
  modified_base 68: mod_base = OTHER; note = 2'O-Methyl ribonucleotide

SEQ ID NO: 6923 - RNA, 68 nt, synthetic construct; identical to SEQ ID NO: 5727
  source 1..68: mol_type = other RNA
  modified_base 1..3: mod_base = OTHER; note = 2'O-Methyl ribonucleotide
  modified_base 1..3: mod_base = OTHER; note = Phosphorothioate linkage
  modified_base 10..15: mod_base = OTHER; note = 2'O-Methyl ribonucleotide
  modified_base 24..28: mod_base = OTHER; note = 2'O-Methyl ribonucleotide
  modified_base 34..37: mod_base = OTHER; note = 2'O-Methyl ribonucleotide
  modified_base 56..57: mod_base = OTHER; note = 2'Fluorine ribonucleotide
  modified_base 59: mod_base = OTHER; note = 2'Fluorine ribonucleotide
  modified_base 65: mod_base = OTHER; note = 2'Fluorine ribonucleotide
  modified_base 66..67: mod_base = OTHER; note = Phosphorothioate linkage
  modified_base 67: mod_base = OTHER; note = 2'Fluorine ribonucleotide
  modified_base 68: mod_base = OTHER; note = 2'O-Methyl ribonucleotide

SEQ ID NO: 6924 - RNA, 68 nt, synthetic construct; identical to SEQ ID NO: 5727
  source 1..68: mol_type = other RNA
  modified_base 1..3: mod_base = OTHER; note = 2'O-Methyl ribonucleotide
  modified_base 1..3: mod_base = OTHER; note = Phosphorothioate linkage
  modified_base 10..15: mod_base = OTHER; note = 2'O-Methyl ribonucleotide
  modified_base 24..28: mod_base = OTHER; note = 2'O-Methyl ribonucleotide
  modified_base 34..37: mod_base = OTHER; note = 2'O-Methyl ribonucleotide
  modified_base 44..47: mod_base = OTHER; note = 2'O-Methyl ribonucleotide
  modified_base 56..57: mod_base = OTHER; note = 2'Fluorine ribonucleotide
  modified_base 59: mod_base = OTHER; note = 2'Fluorine ribonucleotide
  modified_base 65: mod_base = OTHER; note = 2'Fluorine ribonucleotide
  modified_base 66..67: mod_base = OTHER; note = Phosphorothioate linkage
  modified_base 67: mod_base = OTHER; note = 2'Fluorine ribonucleotide
  modified_base 68: mod_base = OTHER; note = 2'O-Methyl ribonucleotide

SEQ ID NO: 6925 - RNA, 68 nt, synthetic construct; identical to SEQ ID NO: 5727
  source 1..68: mol_type = other RNA
  modified_base 1..3: mod_base = OTHER; note = 2'O-Methyl ribonucleotide
  modified_base 1..3: mod_base = OTHER; note = Phosphorothioate linkage
  modified_base 10..15: mod_base = OTHER; note = 2'O-Methyl ribonucleotide
  modified_base 24..28: mod_base = OTHER; note = 2'O-Methyl ribonucleotide
  modified_base 34..37: mod_base = OTHER; note = 2'O-Methyl ribonucleotide
  modified_base 39..42: mod_base = OTHER; note = 2'O-Methyl ribonucleotide
  modified_base 56..57: mod_base = OTHER; note = 2'Fluorine ribonucleotide
  modified_base 59: mod_base = OTHER; note = 2'Fluorine ribonucleotide
  modified_base 65: mod_base = OTHER; note = 2'Fluorine ribonucleotide
  modified_base 65..67: mod_base = OTHER; note = Phosphorothioate linkage
  modified_base 67: mod_base = OTHER; note = 2'Fluorine ribonucleotide
  modified_base 68: mod_base = OTHER; note = 2'O-Methyl ribonucleotide

SEQ ID NO: 6926 - RNA, 68 nt, synthetic construct; identical to SEQ ID NO: 5727
  source 1..68: mol_type = other RNA
  modified_base 1..15: mod_base = OTHER; note = 2'O-Methyl ribonucleotide
  modified_base 1..3: mod_base = OTHER; note = Phosphorothioate linkage
  modified_base 24..28: mod_base = OTHER; note = 2'O-Methyl ribonucleotide
  modified_base 34..37: mod_base = OTHER; note = 2'O-Methyl ribonucleotide
  modified_base 39..42: mod_base = OTHER; note = 2'O-Methyl ribonucleotide
  modified_base 56..57: mod_base = OTHER; note = 2'Fluorine ribonucleotide
  modified_base 59: mod_base = OTHER; note = 2'Fluorine ribonucleotide
  modified_base 65: mod_base = OTHER; note = 2'Fluorine ribonucleotide
  modified_base 66..67: mod_base = OTHER; note = Phosphorothioate linkage
  modified_base 67: mod_base = OTHER; note = 2'Fluorine ribonucleotide
  modified_base 68: mod_base = OTHER; note = 2'O-Methyl ribonucleotide

SEQ ID NO: 6927 - RNA, 68 nt, synthetic construct; identical to SEQ ID NO: 5727
  source 1..68: mol_type = other RNA
  modified_base 1..3: mod_base = OTHER; note = 2'O-Methyl ribonucleotide
  modified_base 1..3: mod_base = OTHER; note = Phosphorothioate linkage
  modified_base 10..28: mod_base = OTHER; note = 2'O-Methyl ribonucleotide
  modified_base 34..37: mod_base = OTHER; note = 2'O-Methyl ribonucleotide
  modified_base 44..47: mod_base = OTHER; note = 2'O-Methyl ribonucleotide
  modified_base 56..57: mod_base = OTHER; note = 2'Fluorine ribonucleotide
  modified_base 59: mod_base = OTHER; note = 2'Fluorine ribonucleotide
  modified_base 65: mod_base = OTHER; note = 2'Fluorine ribonucleotide
  modified_base 66..67: mod_base = OTHER; note = Phosphorothioate linkage
  modified_base 67: mod_base = OTHER; note = 2'Fluorine ribonucleotide
  modified_base 68: mod_base = OTHER; note = 2'O-Methyl ribonucleotide

SEQ ID NO: 6928 - RNA, 68 nt, synthetic construct; identical to SEQ ID NO: 5727
  source 1..68: mol_type = other RNA
  modified_base 1..28: mod_base = OTHER; note = 2'O-Methyl ribonucleotide
  modified_base 1..3: mod_base = OTHER; note = Phosphorothioate linkage
  modified_base 34..37: mod_base = OTHER; note = 2'O-Methyl ribonucleotide
  modified_base 44..47: mod_base = OTHER; note = 2'O-Methyl ribonucleotide
  modified_base 56..57: mod_base = OTHER; note = 2'Fluorine ribonucleotide
  modified_base 59: mod_base = OTHER; note = 2'Fluorine ribonucleotide
  modified_base 65: mod_base = OTHER; note = 2'Fluorine ribonucleotide
  modified_base 65..67: mod_base = OTHER; note = Phosphorothioate linkage
  modified_base 67: mod_base = OTHER; note = 2'Fluorine ribonucleotide
  modified_base 68: mod_base = OTHER; note = 2'O-Methyl ribonucleotide

SEQ ID NO: 6929 - RNA, 68 nt, synthetic construct; identical to SEQ ID NO: 5727
  source 1..68: mol_type = other RNA
  modified_base 1..3: mod_base = OTHER; note = 2'O-Methyl ribonucleotide
  modified_base 1..3: mod_base = OTHER; note = Phosphorothioate linkage
  modified_base 10..15: mod_base = OTHER; note = 2'O-Methyl ribonucleotide
  modified_base 24..37: mod_base = OTHER; note = 2'O-Methyl ribonucleotide
  modified_base 44..47: mod_base = OTHER; note = 2'O-Methyl ribonucleotide
  modified_base 56..57: mod_base = OTHER; note = 2'Fluorine ribonucleotide
  modified_base 59: mod_base = OTHER; note = 2'Fluorine ribonucleotide
  modified_base 65: mod_base = OTHER; note = 2'Fluorine ribonucleotide
  modified_base 66..67: mod_base = OTHER; note = Phosphorothioate linkage
  modified_base 67: mod_base = OTHER; note = 2'Fluorine ribonucleotide
  modified_base 68: mod_base = OTHER; note = 2'O-Methyl ribonucleotide

SEQ ID NO: 6930 - RNA, 68 nt, synthetic construct; identical to SEQ ID NO: 5727
  source 1..68: mol_type = other RNA
  modified_base 1..37: mod_base = OTHER; note = 2'O-Methyl ribonucleotide
  modified_base 1..3: mod_base = OTHER; note = Phosphorothioate linkage
  modified_base 44..47: mod_base = OTHER; note = 2'O-Methyl ribonucleotide
  modified_base 56..57: mod_base = OTHER; note = 2'Fluorine ribonucleotide
  modified_base 59: mod_base = OTHER; note = 2'Fluorine ribonucleotide
  modified_base 65: mod_base = OTHER; note = 2'Fluorine ribonucleotide
  modified_base 66..67: mod_base = OTHER; note = Phosphorothioate linkage
  modified_base 67: mod_base = OTHER; note = 2'Fluorine ribonucleotide
  modified_base 68: mod_base = OTHER; note = 2'O-Methyl ribonucleotide

SEQ ID NO: 6931 - DNA, 20 bp, Homo sapiens
  source 1..20: mol_type = genomic DNA
ccccagacctgtaatagtca

SEQ ID NO: 6932 - DNA, 20 bp, Homo sapiens
  source 1..20: mol_type = genomic DNA
ccccagacctgtaatagtca

SEQ ID NO: 6933 - DNA, 20 bp, Homo sapiens
  source 1..20: mol_type = genomic DNA
ccccagacctgtaatagtca

SEQ ID NO: 6934 - DNA, 20 bp, Homo sapiens
  source 1..20: mol_type = genomic DNA
ccccagacctgtaatagtca

SEQ ID NO: 6935 - DNA, 20 bp, Homo sapiens
  source 1..20: mol_type = genomic DNA
ccccagacctgtaatagtca

SEQ ID NO: 6936 - DNA, 20 bp, Homo sapiens
  source 1..20: mol_type = genomic DNA
ccccagacctgtaatagtca

SEQ ID NO: 6937 - DNA, 20 bp, Homo sapiens
  source 1..20: mol_type = genomic DNA
ccccagacctgtaatagtca

SEQ ID NO: 6938 - DNA, 20 bp, Homo sapiens
  source 1..20: mol_type = genomic DNA
ccccagacctgtaatagtca

SEQ ID NO: 6939 - DNA, 20 bp, Homo sapiens
  source 1..20: mol_type = genomic DNA
ccccagacctgtaatagtca

SEQ ID NO: 6940 - DNA, 20 bp, Homo sapiens
  source 1..20: mol_type = genomic DNA
ccccagacctgtaatagtca

SEQ ID NO: 6941 - DNA, 20 bp, Homo sapiens
  source 1..20: mol_type = genomic DNA
ccccagacctgtaatagtca

SEQ ID NO: 6942 - DNA, 20 bp, Homo sapiens
  source 1..20: mol_type = genomic DNA
ggacagagggtcagcatgcc

SEQ ID NO: 6943 - DNA, 20 bp, Homo sapiens
  source 1..20: mol_type = genomic DNA
ggacagagggtcagcatgcc

SEQ ID NO: 6944 - DNA, 20 bp, Homo sapiens
  source 1..20: mol_type = genomic DNA
ggacagagggtcagcatgcc

SEQ ID NO: 6945 - DNA, 20 bp, Homo sapiens
  source 1..20: mol_type = genomic DNA
ggacagagggtcagcatgcc

SEQ ID NO: 6946 - DNA, 20 bp, Homo sapiens
  source 1..20: mol_type = genomic DNA
ggacagagggtcagcatgcc

SEQ ID NO: 6947 - DNA, 20 bp, Homo sapiens
  source 1..20: mol_type = genomic DNA
ggacagagggtcagcatgcc

SEQ ID NO: 6948 - DNA, 20 bp, Homo sapiens
  source 1..20: mol_type = genomic DNA
ggacagagggtcagcatgcc

SEQ ID NO: 6949 - DNA, 20 bp, Homo sapiens
  source 1..20: mol_type = genomic DNA
ggacagagggtcagcatgcc

SEQ ID NO: 6950 - DNA, 20 bp, Homo sapiens
  source 1..20: mol_type = genomic DNA
ggacagagggtcagcatgcc

SEQ ID NO: 6951 - DNA, 20 bp, Homo sapiens
  source 1..20: mol_type = genomic DNA
ggacagagggtcagcatgcc

SEQ ID NO: 6952 - DNA, 20 bp, Homo sapiens
  source 1..20: mol_type = genomic DNA
ggacagagggtcagcatgcc

SEQ ID NO: 6953 - RNA, 68 nt, synthetic construct; identical to SEQ ID NO: 5726
  source 1..68: mol_type = other RNA
  modified_base 1..3: mod_base = OTHER; note = 2'O-Methyl ribonucleotide
  modified_base 1..3: mod_base = OTHER; note = Phosphorothioate linkage
  modified_base 10..13: mod_base = OTHER; note = Phosphorothioate linkage
  modified_base 11..14: mod_base = OTHER; note = 2'O-Methyl ribonucleotide
  modified_base 24..28: mod_base = OTHER; note = Phosphorothioate linkage
  modified_base 25..27: mod_base = OTHER; note = 2'O-Methyl ribonucleotide
  modified_base 34..37: mod_base = OTHER; note = 2'O-Methyl ribonucleotide
  modified_base 39..42: mod_base = OTHER; note = Phosphorothioate linkage
  modified_base 56..67: mod_base = OTHER; note = 2'Fluorine ribonucleotide
  modified_base 65..67: mod_base = OTHER; note = Phosphorothioate linkage
  modified_base 68: mod_base = OTHER; note = 2'O-Methyl ribonucleotide

SEQ ID NO: 6954 - RNA, 68 nt, synthetic construct
  source 1..68: mol_type = other RNA
  modified_base 1..3: mod_base = OTHER; note = 2'O-Methyl ribonucleotide
  modified_base 1..3: mod_base = OTHER; note = Phosphorothioate linkage
  modified_base 10..13: mod_base = OTHER; note = Phosphorothioate linkage
  modified_base 11..14: mod_base = OTHER; note = 2'O-Methyl ribonucleotide
  modified_base 24..28: mod_base = OTHER; note = Phosphorothioate linkage
  modified_base 25..27: mod_base = OTHER; note = 2'O-Methyl ribonucleotide
  modified_base 34..37: mod_base = OTHER; note = 2'O-Methyl ribonucleotide
  modified_base 39..42: mod_base = OTHER; note = Phosphorothioate linkage
  modified_base 56..67: mod_base = OTHER; note = 2'Fluorine ribonucleotide
  modified_base 65..67: mod_base = OTHER; note = Phosphorothioate linkage
  modified_base 68: mod_base = OTHER; note = 2'O-Methyl ribonucleotide
gttgagaatcgaaagattctcaaccttttaatttctactgttgtagatctccagacctataatagtca

SEQ ID NO: 6955 - RNA, 68 nt, synthetic construct; identical to SEQ ID NO: 5705
  source 1..68: mol_type = other RNA
  modified_base 1..3: mod_base = OTHER; note = 2'O-Methyl ribonucleotide
  modified_base 1..3: mod_base = OTHER; note = Phosphorothioate linkage
  modified_base 10..13: mod_base = OTHER; note = Phosphorothioate linkage
  modified_base 11..14: mod_base = OTHER; note = 2'O-Methyl ribonucleotide
  modified_base 24..28: mod_base = OTHER; note = Phosphorothioate linkage
  modified_base 25..27: mod_base = OTHER; note = 2'O-Methyl ribonucleotide
  modified_base 34..37: mod_base = OTHER; note = 2'O-Methyl ribonucleotide
  modified_base 39..42: mod_base = OTHER; note = Phosphorothioate linkage
  modified_base 56..67: mod_base = OTHER; note = 2'Fluorine ribonucleotide
  modified_base 65..67: mod_base = OTHER; note = Phosphorothioate linkage
  modified_base 68: mod_base = OTHER; note = 2'O-Methyl ribonucleotide

SEQ ID NO: 6956 - RNA, 20 nt, synthetic construct
  source 1..20: mol_type = other RNA
tctacnnnnngtagatnnnn

SEQ ID NO: 6957 - RNA, 18 nt, synthetic construct
  source 1..18: mol_type = other RNA
cctgcnnnngcaggnnnn

SEQ ID NO: 6958 - DNA, 20 bp, synthetic construct
  source 1..20: mol_type = other DNA
gtcgaggcttgcgacgtggt

SEQ ID NO: 6959 - DNA, 20 bp, synthetic construct
  source 1..20: mol_type = other DNA
tggagatatcttgaaccttg

SEQ ID NO: 6960 - protein, 6 aa, synthetic construct
HHHHHH

SEQ ID NO: 6961 - protein, 5 aa, synthetic construct
GGGGS

SEQ ID NO: 6962 - protein, 8 aa, synthetic construct
LEVQFQGP

SEQ ID NO: 6963 - protein, 7 aa, synthetic construct
ENLYFQG

SEQ ID NO: 6964 - DNA, 291 bp, synthetic construct
  source 1..291: mol_type = other DNA
tcggactcagaagtcaatcaagaagctaagccagaggtcaagccagaagtcaagcctgagactcacatcaatttaaaggtgtccgatggatcttcagagatcttcttcaagatcaaaaagaccactcctttaagaaggctgatggaagcgttcgctaaaagacagggtaaggaaatggactccttaagattcttgtacgacggtattagaattcaagctgatcagacccctgaagatttggacatggaggataacgatattattgaggctcacagagaacagattggtgga

SEQ ID NO: 6965 - protein, 370 aa, synthetic construct [sequence omitted]
